(19) United States
(12) Patent Application Publication
(10) Pub. No.: US 2006/0063152 A1
(43) Pub. Date: Mar. 23, 2006

(54) Novel gene and protein encoded by the gene

(76) Inventors: Osamu Ohara, Chiba (JP); Takahiro Nagase, Chiba (JP); Daisuke Nakajima, Chiba (JP)

Correspondence Address: OBLON, SPIVAK, MCCLELLAND, MAIER & NEUSTADT, P.C., 1940 DUKE STREET, ALEXANDRIA, VA, 22314, US

(21) Appl. No.: 10/204,639

(22) PCT Filed: Dec. 20, 2001
(86) PCT No.: PCT/JP01/11199

§ 371 Date: Aug. 22, 2002

(30) Foreign Application Priority Data
Dec. 22, 2000 (JP) 2000-389742

(51) Int. Cl. C12Q 1/68; C07H 21/02; C12P 21/06; C12M 1/34; C07K 14/47; C07K 16/18

(52) U.S. Cl. 435/6; 435/69.1; 435/320.1; 435/325; 435/287.2; 530/350; 530/388.1; 536/23.1

(57) ABSTRACT

Novel DNAs containing the regions which encode proteins have been directly cloned from cDNA libraries derived from the human adult whole brain, the human adult hippocampus and the human embryonic whole brain, the nucleotide sequences thereof have been determined, and their functions have been identified. The present invention provides DNA which comprises the nucleotide sequence encoding the following polypeptide (a) or (b): (a) a polypeptide comprising an amino acid sequence which is identical or substantially identical to an amino acid sequence represented by any one of SEQ ID NOS: 1 to 70; (b) a polypeptide comprising an amino acid sequence derived from the amino acid sequence represented by any one of SEQ ID NOS: 1 to 70 by deletion, substitution or addition of a section of amino acids, and having biological activity which is substantially the same characteristic with the function of the polypeptide of (a); a recombinant polypeptide, which is encoded by the above DNA; and a protein containing the polypeptide.

### TECHNICAL FIELD

[0001] The present invention relates to DNA and a gene containing the DNA, and a recombinant polypeptide encoded by the DNA and a novel recombinant protein containing the polypeptide.

### BACKGROUND ART

[0002] An enormous amount of information on the nucleotide sequence of the human genome has been obtained by large-scale sequencing in the Human Genome Project and analysis of the information is continuing on a daily basis.

[0003] The ultimate goal of the Human Genome Project is not just simple determination of the entire nucleotide sequence of the genome, but also the elucidation of various human life phenomena based on the structural information, that is the nucleotide sequence information of DNA.

[0004] Only limited regions of the human genome sequence encode proteins. Currently, the coding regions are predicted by the neural network or an information science technique, called the Hidden Markov Model. However, these models' predictive abilities are not yet sufficiently reliable.

### DISCLOSURE OF THE INVENTION

[0005] For the purpose of finding novel genes, we have completed the present invention by succeeding in directly cloning novel DNAs comprising regions that encode proteins from cDNA libraries derived from the human adult whole brain, the human adult hippocampus and the human embryonic whole brain, and determining the nucleotide sequences thereof.

[0006] In a first embodiment, the present invention relates to DNA comprising a nucleotide sequence encoding the following (a) or (b):
[0007] (a) a polypeptide consisting of an amino acid sequence which is identical or substantially identical to an amino acid sequence represented by any one of SEQ ID NOS: 1 to 70;
[0008] (b) a polypeptide consisting of an amino acid sequence derived from an amino acid sequence represented by any one of SEQ ID NOS: 1 to 70 by deletion, substitution or addition of a section of amino acid(s), and having biological activity which is substantially the same characteristic with the function of the polypeptide of (a). Examples of such DNA include, but are not limited to, DNAs comprising the nucleotide sequences of SEQ ID NOS: 71 to 140.

[0009] In a second embodiment, the present invention further relates to a DNA hybridizing to the DNA of the first embodiment of the present invention under stringent conditions, and encoding a polypeptide having biological activity which is substantially the same characteristic with the function of the polypeptide of (a) above.

[0010] Hereinafter, the DNAs of the first and the second embodiments of the present invention are together referred to as “the DNA of the present invention.” Further, the present invention also relates to antisense DNA comprising a nucleotide sequence which is substantially complementary to the DNA of the present invention.

[0011] In a third embodiment, the present invention relates to a gene construct containing the DNA of the present invention. The term “gene construct” in the present specification refers to every artificially-engineered gene. Examples of the gene construct include, but are not limited to, a vector containing the DNA of the present invention or the antisense DNA of the DNA of the present invention, and an expression vector of the DNA of the present invention.

[0012] In a fourth embodiment, the present invention relates to the following (a) or (b):
[0013] (a) a polypeptide, consisting of an amino acid sequence which is identical or substantially identical to an amino acid sequence represented by any one of SEQ ID NOS: 1 to 70;
[0014] (b) a polypeptide, consisting of an amino acid sequence derived from the amino acid sequence represented by any one of SEQ ID NOS: 1 to 70 by deletion, substitution or addition of a section of amino acids, and having biological activity which is substantially the same characteristic with the function of the polypeptide of (a).

[0015] In a fifth embodiment, the present invention relates to a recombinant polypeptide encoded by the gene construct of the third embodiment of the present invention.

[0016] Hereinafter, the above polypeptides are together also referred to as “the polypeptide of the present invention.” The term “polypeptide” in the present specification refers to “polymers of amino acids having every molecular weight.” The present invention also relates to a recombinant protein containing the polypeptide of the present invention. As defined above, in the present specification the term “polypeptide” is not to be limited by molecular weight, and therefore the term “the polypeptide of the present invention” also includes a recombinant protein containing the polypeptide of the present invention.

[0017] In a sixth embodiment, the present invention relates to an antibody against the polypeptide of the present invention.

[0018] In a seventh embodiment, the present invention relates to a DNA chip on which the DNAs of the present invention are arrayed.

[0019] In an eighth embodiment, the present invention relates to a polypeptide chip on which the polypeptides of the present invention are arrayed.

[0020] In a ninth embodiment, the present invention relates to an antibody chip on which the antibodies of the sixth embodiment of the present invention are arrayed.

[0021] Table 1 shows the names of clones having the DNA of the present invention, lengths of the polypeptide of the present invention, their putative functions and grounds for prediction.

[0022] The DNAs of the present invention are identified by determining the nucleotide sequences after isolating them as cDNA fragments from cDNA libraries that we have prepared using as a starter material the commercially available (Clontech) mRNA of human adult whole brain, the human adult hippocampus and the human embryonic whole brain.

[0023] Specifically, clones are randomly isolated from cDNA libraries derived from the human adult whole brain, the human adult hippocampus and the human embryonic whole brain prepared according to the method of Ohara et al. (DNA Research 4:53-59 (1997)).

[0024] Next, redundant clones (clones containing the same sequences) are removed by hybridization, followed by in vitro transcription and translation. Both termini of its nucleotide sequence are determined for a clone that has been confirmed to have products of 50 kDa or more.

[0025] Homology searches are performed with databases of known genes using the thus obtained terminal nucleotide sequences as queries. As a result, the full-length nucleotide sequence of a clone that is shown to be new is determined.

[0026] As described above, unknown genes that cannot be obtained by standard cloning techniques, which rely on known genes, can now be cloned systematically.

[0027] Further, the entire region of a human-derived gene containing the DNA of the present invention can also be prepared by a PCR method, such as RACE, while exercising proper care so as not to cause short fragments or any artificial mistakes in obtained sequences.

[0028] Furthermore, the present invention provides a recombinant vector which comprises the DNA of the present invention or a gene construct containing the DNA of the present invention; a transformant retaining the recombinant vector; a method for producing the polypeptide of the present invention or a recombinant protein containing the polypeptide, or salts thereof, which comprises the steps of culturing the transformant, producing and accumulating the polypeptide of the present invention or the recombinant protein containing the polypeptide, and collecting these products; and the thus produced polypeptide of the present invention or the recombinant protein containing the polypeptide, or salts thereof.

[0029] The present invention also relates to a pharmaceutical preparation comprising the DNA of the present invention or the gene construct; a pharmaceutical preparation comprising a polynucleotide (DNA) comprising a nucleotide sequence which encodes the polypeptide of the present invention or a partial polypeptide thereof, or a recombinant protein containing the polypeptides, an antisense nucleotide comprising a nucleotide sequence substantially complementary to the nucleotide sequence which encodes the polypeptide of the present invention or a partial polypeptide thereof, or a recombinant protein containing the polypeptides; a pharmaceutical preparation comprising the polynucleotide of the present invention and the antisense nucleotide , and a pharmaceutical preparation comprising the polypeptide of the present invention or a partial polypeptide thereof, and a recombinant protein containing the polypeptides.

[0030] The present invention further relates to a DNA chip, a peptide chip and an antibody chip that are prepared by arraying the DNAs of the present invention, the polypeptides of the present invention and the antibodies against the polypeptide of the present invention, respectively.

[0031] The present invention further relates to an antibody against the polypeptide of the present invention or a partial polypeptide thereof or a recombinant protein containing the polypeptides, or against salts thereof, and a method for screening a substance which specifically interacts with the polypeptide of the present invention by using the polypeptide of the present invention, a partial polypeptide thereof or a recombinant protein containing the polypeptides, or salts thereof, or antibodies against these substances; a kit for screening; and the substance (compound) itself which is identified by the screening method.

[0032] Any DNA can be used as the DNA of the present invention, so far as it comprises a nucleotide sequence encoding the above-mentioned polypeptide of the present invention. Further, the DNA of the present invention may be cDNA identified and isolated from cDNA libraries or the like derived from the human brain, from cells or tissues other than the brain, such as the heart, lung, liver, spleen, kidney, and testicle, or synthetic DNA.

[0033] A vector used for constructing libraries may be a bacteriophage, a plasmid, a cosmid, or a phagemid. In addition, using total RNA fractions or mRNA fractions prepared from the above cells or tissues, amplification can be performed directly by a reverse transcriptase-polymerase chain reaction (hereinafter, abbreviated as “RT-PCR method.”).

[0034] Any antisense DNA may be used as an antisense oligonucleotide (DNA) having a nucleotide sequence substantially complementary to the DNA that encodes the polypeptide of the present invention or a partial polypeptide thereof, so far as it comprises a nucleotide sequence substantially complementary to the nucleotide sequence of the DNA, and is capable of inhibiting the expression of the DNA. A substantially complementary sequence is, for example, a nucleotide sequence having preferably about 90% or more, more preferably about 95% or more, and most preferably 100% homology with the full-length or partial nucleotide sequence of the nucleotide sequence complementary to the DNA of the present invention. The antisense DNA of the present invention includes a nucleic acid sequence (RNA or DNA modified) having a similar function to that of the antisense DNA. These antisense DNAs can be produced using a known DNA synthesizer or the like.

[0035] The term “an amino acid sequence substantially identical to an amino acid sequence represented by any one of SEQ ID NOS: 1 to 70” refers to an amino acid sequence having on the overall average about 70% or more, preferably about 80% or more, further preferably about 90% or more, and particularly preferably about 95% or more homology with each of all the amino acid sequences represented by any one of SEQ ID NOS: 1 to 70.

[0036] An example of a polypeptide consisting of an amino acid sequence substantially identical to an amino acid sequence represented by any one of SEQ ID NOS: 1 to 70 of the present invention is a polypeptide having the above homology with the amino acid sequence represented by each of the above SEQ ID NOS, and having biological activity (function) which is substantially the same characteristic with the function of the polypeptide comprising the amino acid sequence represented by each SEQ ID NO. The term “substantially the same characteristic” refers to the activity (function) having the same characteristics.

[0037] Further, the polypeptide of the present invention also includes, for example, a polypeptide consisting of an amino acid sequence derived from an amino acid sequence represented by any one of SEQ ID NOS: 1 to 70 by deletion, substitution or addition of a section of amino acids (preferably about 1 to 20, more preferably about 1 to 10, and further preferably several amino acids) or by a combination of these, and having biological activity (function) which is substantially the same characteristic with the function of a polypeptide comprising an amino acid sequence represented by any one of SEQ ID NOS: 1 to 70.

[0038] The polypeptide consisting of an amino acid sequence which is substantially identical to the above amino acid sequence represented by any one of SEQ ID NOS: 1 to 70, or the polypeptide comprising an amino acid sequence derived from the above amino acid sequence by deletion, substitution or addition of a section of the amino acids can be easily produced by, for example, an appropriate combination of methods known by a person skilled in the art, such as site-directed mutagenesis, homologous recombination of genes, primer elongation and PCR.

[0039] For the polypeptide to have biological activity which is substantially the same characteristics, a possible method is substitution between homologous amino acids (polar or nonpolar amino acids, hydrophobic or hydrophilic amino acids, positively or negatively charged amino acids, aromatic amino acids and the like) among amino acids composing the polypeptide. To maintain biological activity that is substantially the same characteristics, it is preferred to retain amino acids within functional domains contained in each polypeptide of the present invention.

[0040] Further, the DNA of the present invention includes DNA comprising a nucleotide sequence encoding an amino acid sequence represented by any one of SEQ ID NOS: 1 to 70, and a DNA hybridizing to the DNA under stringent conditions, and encoding a polypeptide having biological activity (function) which is the same characteristic with the function of a polypeptide consisting of an amino acid sequence represented by each of the sequences.

[0041] Under such conditions, examples of DNA capable of hybridizing to DNA comprising a nucleotide sequence encoding an amino acid sequence represented by each of the nucleotide sequences of SEQ ID NOS: 1 to 70 include DNA comprising a nucleotide sequence having on the overall average about 80% or more, preferably about 90% or more, more preferably about 95% or more homology with each of all the nucleotide sequences of the DNAs.

[0042] Hybridization can be performed by a method known in the art or a method according to any known methods, such as a method described in Current Protocols in Molecular Biology (edited by Frederick M. Ausubel et al., 1987). When a commercially available library is used, hybridization can also be performed by the method described in the attached instructions.

[0043] The term “stringent conditions” means, for example, conditions that allow hybridizing to the DNA probe of the present invention by southern blot hybridization under conditions that involve hybridization in an 7% SDS solution containing 1 mM sodium EDTA and 0.5 M dibasic sodium phosphate (pH 7.2) at 65° C., and washing membranes in a 1% SDS solution containing 1 mM sodium EDTA and 40 mM dibasic sodium phosphate (pH 7.2) at 65° C. The same stringency can also be achieved by conditions other than the above conditions.

[0044] To clone the DNA of the present invention, amplification is performed by a PCR method using a synthetic DNA primer having an appropriate nucleotide sequence of a part of the polypeptide of the present invention or the like, or the DNA can be selected by hybridization of DNA incorporated in an appropriate vector with DNA labeled using a DNA fragment or synthetic DNA which encodes a section or the full-length region of the polypeptide of the present invention.

[0045] Hybridization can be performed according to, for example, the above-described method in “Current Protocols in Molecular Biology” (edited by Frederick M. Ausubel et al., 1987). In addition, when commercially available libraries are used, hybridization can be performed according to the method described in the attached instructions.

[0046] Cloned DNA encoding a polypeptide can be used intact, or can be used after digestion with restriction enzymes if necessary, or after addition of linkers thereto, depending on the purposes. The DNA may contain ATG as a translation initiating codon at the 5′ terminal side, or TAA, TGA or TAG as a translation termination codon at the 3′ terminal side. These translation initiating and termination codons may be added using an appropriate synthetic DNA adaptor.

[0047] An expression vector for the polypeptide of the present invention can be produced according to any method known in the technical field. For example, the vector can be produced by (1) cleaving a DNA fragment containing the DNA of the present invention or a gene having the DNA of the present invention, and (2) ligating the DNA fragment downstream of a promoter in an appropriate expression vector.

[0048] Examples of vectors that can be used herein include plasmids derived from Escherichia coli, (for example, pBR322, pBR325, pUC18 and pUC118), plasmids derived from Bacillus subtilis (for example, pUB110, pTP5 and pC194), plasmids derived from yeast (for example, pSH19 and pSH15), bacteriophages, such as λ phages, and animal viruses, such as retrovirus, vaccinia virus, baculovirus and the like.

[0049] Any promoter can be used in the present invention, so far as it is appropriate for a host to be used for gene expression. Preferred examples of promoters include, when the host is Escherichia coli, trp promoters, lac promoters, recA promoters, λPL promoters and lpp promoters; when the host is Bacillus subtilis, SPO1 promoters, SPO2 promoters and penP promoters; and when the host is yeast, PHO5 promoters, PGK promoters, GAP promoters and ADH promoters. When animal cells are used as hosts, examples of promoters include SRα promoters, SV40 promoters, LTR promoters, CMV promoters and HSV-TK promoters.

[0050] In addition to the above substances, an enhancer, splicing signal, polyA addition signal, a selection marker, SV40 replication origin and the like that are known in the technical field can be added to the expression vector, if desired. Further, if necessary, a protein encoded by the DNA of the present invention can be expressed as a fusion protein with another protein (for example, glutathione S transferase and protein A). Such a fusion protein can be cleaved with appropriate protease and then separated into each protein.

[0051] Examples of host cells that are used herein include bacteria of the genus Escherichia or the genus Bacillus, yeast, insect cells, insects, and animal cells.

[0052] Specific examples of bacteria of the genus Escherichia that are used herein include Escherichia coli K12/DH1 (Proc. Natl. Acad. Sci. USA, 60:160 (1968)), JM103 (Nucleic Acids Research, 9:309 (1981)), JA221 (Journal of Molecular Biology, 120:517 (1978)), and HB 101 (Journal of Molecular Biology, 41:459 (1969)).

[0053] Examples of bacteria of the genus Bacillus that are used herein include Bacillus subtilis MI114 (Gene, 24:255(1983)) and 207-21 [Journal of Biochemistry, 95:87 (1984)].

[0054] Examples of yeast that are used herein include Saccaromyces, such as Saccaromyces cerevisiae AH22, AH22R-, NA87-11A, DKD-5D and 20B-12; Schizosaccaromyces pombe NCYC1913 and NCYC2036; and Pichia pastoris.

[0055] Examples of animal cells that are used herein include monkey cells, such as COS-7 and Vero, Chinese hamster ovary cells, such as CHO (hereinafter, abbreviated as CHO cells), dhfr gene-deficient CHO cells; mouse L cells, mouse AtT-20, mouse myeloma cells, rat GH3, and human FL cells.

[0056] These host cells can be transformed according to a method known in the technical field. For example, transformation can be performed by referring to Proc. Natl. Acad. Sci. USA, 69:2110 (1972); Gene, 17:107 (1982); Molecular & General Genetics, 168:111 (1979); “Methods in Enzymology,” vol. 194, p 182-187 (1991); Proc. Natl. Acad. Sci. USA, 75:1929 (1978); A Separate Volume 8 of Cell Technology, New Experimental Protocols in Cell Technology, p 263-267 (1995) (issued by Shujunsha); and Virology, 52:456 (1973).

[0057] The thus obtained transformant, which has been transformed with an expression vector containing the DNA of the present invention or a gene containing the DNA of the present invention, can be cultured according to a method known in the technical field.

[0058] For example, when hosts are bacteria of the genus Escherichia, culturing is performed normally at about 15° C. to 43° C. for about 3 to 24 hours, and if necessary, aeration and agitation may be performed. When hosts are bacteria of the genus Bacillus, culturing is performed normally at about 30° C. to 40° C. for about 6 to 24 hours, and if necessary, aeration and agitation may be performed.

[0059] A transformant whose host is yeast is normally cultured using media adjusted to have pH of approximately 5 to 8, at about 20° C. to 35° C. for about 24 to 72 hours, and if necessary, aeration and agitation may be performed.

[0060] A transformant whose host is an animal cell is normally cultured using media adjusted to have pH of about 6 to 8, at about 30° C. to 40° C. for about 15 to 60 hours, and if necessary, aeration and agitation may be performed.

[0061] To isolate and purify the polypeptide or the protein of the present invention from the above culture product, for example, bacteria or cells are collected by a known method after culturing, suspended in an appropriate buffer, disrupted by ultrasonication, lysozyme and/or freezing and thawing, and then centrifuged or filtered, thereby obtaining a crude protein extract. The buffer may contain a protein denaturing agent, such as urea or guanidine hydrochloride, or a surfactant, such as Triton X-100 (trade-mark). When the protein is secreted in a culture solution, bacteria or cells are separated after culturing from the supernatant by a known method, thereby collecting the supernatant. The thus obtained culture supernatant or the protein contained in an extract can be purified by an appropriate combination of known isolation and purification methods.

[0062] The thus obtained polypeptide of the present invention can be converted to a salt by a known method or a method according to the known method. Conversely, when the polypeptide is obtained as a salt, it can be converted to an educt or another salt by a known method or a method according to the known method. Further before or after purification, the protein produced by a recombinant can be freely modified by allowing an appropriate protein modification enzyme, such as trypsin and chymotrypsin, to act on the protein, or polypeptides can be partially removed.

[0063] The presence of the polypeptide of the present invention or its salt can be measured by various binding assays and enzyme immunoassay using a specific antibody.

[0064] The C terminus of the polypeptide of the present invention is normally a carboxyl group (—COOH) or a carboxylate (—COO—), and the C terminus may be an amide (—CONH₂) or ester (—COOR). Here, examples of R in ester that are used herein include a C1-6 alkyl group, such as methyl, ethyl, n-propyl, isopropyl or n-butyl; a C3-8 cycloalkyl group, such as cyclopentyl or cyclohexyl; a C6-12 aryl group, such as phenyl or α-naphthyl; a phenyl-C1-2 alkyl group, such as benzyl or phenethyl; and a C7-14 aralkyl group, such as an α-naphthyl-C1-2 alkyl group, e.g., α-naphthyl methyl. Further, pivaloyl-oxymethylester which is generally used as oral administration may also be used.

[0065] When the polypeptide of the present invention has a carboxyl group (or carboxylate) at the terminus other than the C terminus, the carboxyl group is amidated or esterified. The polypeptide of the present invention encompasses such a polypeptide. An example of ester that is used in this case is the above-mentioned ester at the C-terminus. Moreover, the polypeptide of the present invention also encompasses a polypeptide wherein an amino group of a methionine residue at the N-terminus is protected with a protecting group (for example, a C1-6 acyl group, such as a formyl group or an acetyl group); a polypeptide wherein a glutamic acid residue at the N-terminus which is generated by in vivo cleavage is pyroglutamated; a polypeptide wherein OH, COOH, NH₂, SH and the like on the side chain of intramolecular amino acids are protected with appropriate protecting groups (for example, a C1-6 acyl group, such as a formyl group and an acetyl group); or a complex protein, such as a so-called glycoprotein formed by the binding of sugar chains.

[0066] A partial polypeptide of the polypeptide of the present invention may be any polypeptide which is a partial peptide of the above-mentioned polypeptide of the present invention and has activity which has substantially the same characteristics. For example, a peptide that is used herein comprises a sequence of at least 10 or more, preferably 50 or more, further preferably 70 or more, further more preferably 100 or more, and most preferably 200 or more amino acids of the amino acid sequence composing the polypeptide of the present invention, and, for example, has biological activity substantially the same characteristic with the function of the polypeptide of the present invention. An example of a preferable partial polypeptide of the present invention contains each functional domain. Further, the partial peptide of the present invention normally has a carboxyl group (—COOH) or a carboxylate (—COO—) at the C terminus, and it may also have an amide (—CONH₂) or an ester (—COOR) at the C terminus like the above polypeptide of the present invention may have. Further, examples of the partial peptide of the present invention, similar to the polypeptide of the present invention described above, include a peptide wherein an amino group of a methionine residue at the N terminus is protected with a protecting group; a peptide wherein a glutamyl residue at the N-terminus which is generated by in vivo cleavage is pyroglutamated; a peptide wherein a substituent on the side chain of intramolecular amino acids is protected with an appropriate protecting group; a complex peptide, such as a so-called glycopeptide formed by the binding of sugar chains, or the like. The partial peptide of the present invention can be used as, for example, a reagent, reference materials for experiments, or an immunogen or a portion thereof.

[0067] Particularly preferred salts of the polypeptide of the present invention or the partial peptide are physiologically acceptable acid-added salts. Examples of such salts that are used herein include a salt formed with inorganic acid (for example, hydrochloric acid, phosphoric acid, hydrobromic acid and sulfuric acid), and a salt formed with organic acid (for example, acetic acid, formic acid, propionic acid, fumaric acid, maleic acid, succinic acid, tartaric acid, citric acid, malic acid, oxalic acid, benzoic acid, methane sulfonic acid and benzenesulfonic acid).

[0068] The polypeptide of the present invention, the partial peptide thereof or salts thereof, or amides thereof can be prepared by a chemical synthesis method known in the technical field.

[0069] For example, amino acids whose α-amino groups and side chain functional groups are appropriately protected are condensed on resin (which is commercially available resin for protein synthesis) in accordance with the sequence of a target polypeptide, according to various condensation methods known in the art. Various protecting groups are then removed simultaneously with cleavage of the polypeptide from the resin at the end of reaction. Further, reaction for forming an intramolecular disulfide linkage is conducted in a highly diluted solution, thereby obtaining a target polypeptide, the partial peptide thereof or amides thereof. Examples of activation reagents that can be used to condense the above protected amino acids include those that can be used for polypeptide synthesis and are represented by carbodiimides, such as DCC, N,N′-diisopropylcarbodiimide and N-ethyl-N′-(3-dimethylaminopropyl) carbodiimide. For activation by such reagents, both protected amino acids and a racemization-suppressing additive (for example, HOBt or HOOBt) are directly added to the resin; or protected amino acids can be previously activated with acid anhydride as a control, or HOBt ester or HOOBt ester, and then added to the resin.

[0070] Solvents used for activation of protected amino acids and condensation with resin can be appropriately selected from solvents known in the art as applicable to polypeptide condensation reaction, such as acid amides, halogenated hydrocarbons, alcohols, sulfoxides and ethers. A reaction temperature is appropriately selected from a known range that can be used for reaction of polypeptide linkage formation. Activated amino acid derivatives are normally used in 1.5 to 4-fold excess. When condensation is insufficient as a result of a test using ninhydrin reaction, sufficient condensation can be performed by repeating condensation reaction without eliminating protecting groups. When condensation is still insufficient even when reaction is repeated, unreacted amino acids are acetylated using acetic anhydride or acetylimidazole so as not to affect the subsequent reaction.

[0071] Protecting groups which are normally employed in the technical field can be used for raw materials, such as those for each of amino groups, carboxyl groups and serine hydroxyl groups.

[0072] The protection of functional groups that should not involve the reaction of raw materials, protecting groups, and the elimination of the protecting groups, and the activation of functional groups that involve reaction and the like can be appropriately selected from known groups or performed by known measures.

[0073] The partial peptide of the present invention or a salt thereof can be produced according to a peptide synthesis method known in the technical field, or by cleaving the polypeptide of the present invention with appropriate peptidase. For example, the peptide synthesis method may be either a solid-phase synthesis method or a liquid phase synthesis method. Examples of a known condensation method and a method of elimination of protecting groups are described in Nobuo IZUMIYA et al., Basics and Experiment for Peptide Synthesis, Maruzen (1975); Haruaki YAJIMA and Shunpei SAKAKIBARA, Experiment Course for Biochemistry 1, Protein Chemistry IV, 205 (1977); and Development of Pharmaceutical Preparation 2, vol. 14, Peptide Synthesis, under the editorship of Haruaki YAJIMA, Hirokawa Publishing Co.

[0074] After reaction, the partial peptide of the present invention can be purified and isolated using known methods, such as solvent extraction, distillation, column chromatography, liquid chromatography, recrystallization and the like in combination. When the partial peptide obtained by the above methods is an educt, it can be converted to an appropriate salt by a known method. Conversely, when the peptide is obtained as a salt, it can be converted to an educt by a known method.

[0075] The antibody for the polypeptide of the present invention, the partial peptide thereof or salts thereof may be either a polyclonal or a monoclonal antibody, so far as it can recognize these substances. The antibody for the polypeptide of the present invention, the partial peptide thereof or salts thereof can be produced using as an antigen the polypeptide of the present invention or the partial peptide thereof according to a known method for producing antibodies or anti-serum.

[0076] The antibody of the present invention can be used to detect the polypeptide of the present invention and the like which are present in a specimen, such as body fluid, tissues or the like. In addition, the antibody can be used for preparing an antibody column to be used for purifying these substances; detecting the polypeptide of the present invention in each fraction upon purification; analyzing the behavior of the polypeptide of the present invention within the cells of a specimen; and the like.

[0077] The use of the DNA, the polypeptide and the antibody of the present invention will be further described below.

[0078] Using as a probe the DNA of the present invention, the antisense DNA of the DNA of the present invention, or a gene construct containing these DNAs, abnormalities (of the gene) in DNA or mRNA encoding the polypeptide of the present invention or the partial peptide thereof can be detected.

[0079] The DNA, the antisense DNA or the gene construct of the present invention are useful as a genetic diagnostic agent for, for example, damages, mutation or hypoexpression in the DNA or mRNA, and an increase or hyperexpression of the DNA or mRNA. The above gene diagnosis using the DNA of the present invention can be performed by, for example, a known northern hybridization or a PCR-SSCP method (Genomics, 5:874-879(1989), Proc. Natl. Acad. Sci. USA, 86:2766-2770 (1989)).

[0080] Moreover, for patients who cannot exert normal in vivo functions because of abnormalities or deletions in the DNA or the gene of the present invention, or because the expression amount of the DNA or the gene of the present invention is reduced, it is effective that the DNA or the gene construct of the present invention is introduced for expression into the bodies of the patients by gene therapy using as vehicles appropriate vectors, such as retrovirus vectors, adenovirus vectors and adenovirus-associated virus vectors according to known techniques. Further, when patients cannot exert normal functions because of an increased expression amount, introduction of antisense can be effective.

[0081] The DNA, the antisense DNA of the present invention, or the gene construct thereof can be administered alone, or in combination with an adjuvant to promote uptake using a gene gun or a catheter, such as a hydrogel catheter.

[0082] In another example, injection of the polypeptide of the present invention or the like into patients with the above diseases also enables the polypeptide of the present invention or the like to exert its function in the patients.

[0083] Furthermore, the antibody of the present invention can be used for quantitatively determining the polypeptide of the present invention in a test liquid by a known method. Specifically, the antibody of the present invention can be used for quantitative determination by a sandwich immuno-assay using monoclonal antibodies, detection by tissue staining, and the like, by which, for example, diseases that involve the polypeptide of the present invention or the like can be diagnosed.

[0084] For these purposes, an antibody molecule itself can be used, or the antibody molecules F(ab′)2, Fab′ or Fab fractions can be used. Quantitative determination methods for the polypeptide of the present invention using the antibody of the present invention are not specifically limited. Any measurement method can be used, so far as it involves detecting the amount of antibodies, antigens or antibody-antigen complexes corresponding to the amount of antigens (for example, protein amount) in a test liquid by chemical or physical means, and calculating with a calibration curve which has been prepared using a standardized solution containing a known amount of antigens. For example, nephrometry, competitive assay, immunometric assay and sandwich assay are preferably used, and a later described sandwich assay is preferred in terms of sensitivity and specificity. Examples of a labeling agent that can be used in a measurement method using a labeling substance include a substance known in the technical field, such as radioisotopes, enzymes, fluorescent materials and light-emitting materials.

[0085] Details about the general technical procedures concerning these measurement and detection methods can be referred to in a review, reference book or the like, such as Radioimmunoassay 2 edited by Hiroshi IRIE, (Kodansha, issued in 1979); Enzyme Immunoassay edited by Eiji ISHIKAWA et al., (3^{rd} edition; Igaku-Shoin, issued in 1987); and Methods in Enzymology (issued by Academic Press), vol. 70, “Immunochemical Techniques (Part A),” vol. 73, “Immunochemical Techniques (Part B),” vol. 74, “Immunochemical Techniques (Part C),” vol. 84, “Immunochemical Techniques (Part D: Selected Immunoassays),” vol. 92, “Immunochemical Techniques (Part E: Monoclonal Antibodies and General Immunoassay Methods),” and vol. 121, “Immunochemical Techniques (Part I: Hybridoma Technology and Monoclonal Antibodies).”

[0086] Moreover, DNA chips prepared by arraying the DNA of the present invention are useful in detecting mutations and polymorphism of the DNA of the present invention, and monitoring the DNA dynamics. Regarding DNA array, which is a type of DNA chip, see “DNA Microarray and Current PCR method” (a separate volume of Cell Technology, Genome Science Series 1, under the editorship of Masaaki MURAMATSU and Hiroyuki NABA, 1^{st} impression of the first edition, issued on Mar. 16, 2000) and the like.

[0087] Further, polypeptide chip prepared by arraying the polypeptides of the present invention can be a strong tool for functional analysis on the expression, interaction and posttranslational modification of the polypeptides of the present invention, and for identification and purification of proteins.

[0088] Antibody chip prepared by arraying antibodies against the polypeptides of the present invention are very useful in analyzing the correlation between the polypeptides of the present invention and diseases, disorders, or other physiological phenomena.

[0089] Methods and materials for preparing the chip are known by persons skilled in the art.

[0090] Furthermore, the polypeptides of the present invention or the like are useful as reagents for screening compounds which interact specifically with these substances. Specifically, the present invention provides a method for screening compounds which specifically interact with the polypeptide of the present invention, a partial peptide thereof or salts thereof, or antibodies against them by using these substances; and provides the screening kit therefor.

[0091] Compounds or salts thereof that are identified using the screening method or the screening kit of the present invention are selected from the above test compounds. The compounds interact with the polypeptide of the present invention or the like. For example, the compounds regulate, inhibit, promote or antagonize the biological activity of the polypeptide of the present invention or the like. The compound or a salt thereof may directly act on the activity of the polypeptide of the present invention or the like, or indirectly act on the activity of the polypeptide of the present invention or the like by acting on the expression of the polypeptide of the present invention or the like. An example of the salt of the compound that is used herein is a pharmaceutically acceptable salt. Specific examples of such salts include a salt formed with inorganic base, a salt formed with organic base, a salt formed with inorganic acid, a salt formed with organic acid, and a salt formed with basic or acidic amino acid. Compounds which inhibit the biological activity of the polypeptide of the present invention or the like can also be used as pharmaceutical preparations, such as therapeutic agents and preventive agents for each of the above-mentioned diseases.

[0092] When nucleotides (bases) and amino acids are indicated with abbreviations in the present specification, the abbreviations follow the IUPAC-IUB Joint Commission on Biochemical Nomenclature, or those commonly used in the art. Amino acids for which optical isomerism is possible are, unless otherwise specified, in the L form.

### BEST MODE FOR CARRYING OUT THE INVENTION

[0093] The present invention will now be further described by means of examples that are not intended to limit the present invention. The various gene manipulations employed in the examples are according to the methods described in the above Current Protocols in Molecular Biology (edited by Frederick M. Ausubel et al., 1987).

(1) Construction of cDNA Library Derived from Human Adult Whole Brain, Human Adult Hippocampus and Human Embryonic Whole Brain

[0094] Double-stranded cDNA was synthesized using an oligonucleotide having Not-I site (GACTAGTTCTAGATCGCGAGCGGCCGCCC(T)₁₅) (Invitrogen) as a primer, mRNAs (Clontech) derived from the human adult whole brain, the human adult hippocampus and the human embryonic whole brain as templates, and a SuperScriptII reverse transcriptase kit (Invitrogen). Next, an adaptor (Invitrogen) having SalI site was ligated to the cDNA, followed by digestion with NotI and 1% low-melt agarose electrophoresis. Thus, DNA fragments of 3 kb or more were purified.

[0095] The purified cDNA fragment was ligated to pBluescript IISK+ plasmid pre-treated with SalI-NotI restriction enzymes. The recombinant plasmid was introduced into Escherichia coli strain ElectroMax DH10B (Invitrogen) by electroporation.

(2) Screening

[0096] Subsequently, clones were randomly picked up from the constructed cDNA library, and then spotted onto membranes. The mixture of oligo DNAs (each comprising 21 nucleotides) was prepared based on each of the full-length nucleotide sequences of approximately 1300 clones that we had previously analyzed. Each 3′ terminus of the oligo DNAs was labeled with DIG using terminal transferase. Using the DIG-labeled DNAs as probes, dot hybridization (Current Protocols in Molecular Biology, edited by Frederick M. Ausubel et al, 1987) was performed so as to remove redundant clones (clones containing the same sequences).

[0097] Next, in vitro transcription and translation (Promega, TNT T7 Quick Coupled Transcription/Translation System cat. No. L1107) were performed, thereby selecting clones for which products of 50 kDa or more had been confirmed.

[0098] The terminal nucleotide sequences of the selected clones were then determined. Using the obtained sequences as queries, a homology search program BLASTN 2.0.14 (Stephen F. Altschul, Thomas L. Madden, Alejandro A. Schaffer, Jinghui Zhang, Zheng Zhang, Webb Miller, and David J. Lipman (1997), “Gapped BLAST and PSI-BLAST: a new generation of protein database search programs,” Nucleic Acids Res. 25:3389-3402) was run on nr database (GenBank+EMBL+DDBJ+PDB sequences which do not contain EST, STS, GSS or HTGS (phase 0, 1 or 2) sequences). As a result, the full-length nucleotide sequences of novel genes, for which no homologous gene was present, were determined.

[0099] For sequencing, a DNA sequencer (ABI PRISM377) and a reaction kit which are manufactured by PE Applied Biosystems were used. Most sequences were determined by a dye terminator method using shotgun clones. Part of the nucleotide sequences was determined by synthesizing oligonucleotides based on the determined nucleotide sequences, and then performing a primer walking method.

[0100] As described above, screening for novel DNAs or genes was performed. As a result, a novel DNA or a gene represented by any one of SEQ ID NOS: 71 to 140 in the sequence listing was detected.

[0101] The nucleotide sequences of these novel DNAs or genes were determined by the above sequencing method. Table 1 shows the names of clones having the DNA or the gene of the present invention, the length of a polypeptide encoded by the gene in the clone, its putative function and the grounds for prediction.

TABLE 1
Clone Name and Putative Function

| | Clone | | | | |
|---|---|---|---|---|---|
| SEQ | Name/Protein length/ | | | | |
| ID | Full length or partial | | | | Grounds for |
| NO: | sequence | | | Putative function | prediction |
| 1 | fg01864 | 323 | Partial | Involved in mitoses, cell motility | Partially has a region |
| | | | sequence | and phagocytosis through the | having 50% homology to |
| | | | | regulation of the cytoskeleton. | coronin-, actin-binding |
| | | | | Useful in therapy and diagnosis in | protein 1C. |
| | | | | the field of regulating the dynamic | |
| | | | | states of cells, such as suppression | |
| | | | | of cancer metastasis and the action | |
| | | | | of immunocytes. | |
| 2 | fg02011 | 314 | Partial | Regulates gene expression by binding | Partially has a region |
| | | | sequence | of C2H2 type zinc finger motif to | having 42% homology to |
| | | | | DNA, and interaction between | zinc finger protein 91 |
| | | | | Kruppel-associated box (KRAB) | and has zf-C2H2 motifs. |
| | | | | domain and the other transcriptional | |
| | | | | apparatus. The deletion or the | |
| | | | | mutation of the protein may cause | |
| | | | | abnormalities in morphogenesis or | |
| | | | | cell proliferation. The detection | |
| | | | | of the mutation is useful in | |
| | | | | diagnosing cancer and the | |
| | | | | introduction of the normal gene is | |
| | | | | useful in treating cancer. | |
| 3 | fg02301 | 187 | Partial | A molecule inferred to be involved in | Partially has a region |
| | | | sequence | cell adhesion because it has a | having 39% homology to |
| | | | | transmembrane domain and three | the immunoglobulin |
| | | | | Ig-like C2-type domains, and shares | superfamily, and has ig |
| | | | | high homology with NCAM1 and NCAM2. | motifs and a sosui |
| | | | | Since the molecule regulates | transmembrane domain. |
| | | | | intercellular adhesion, it is useful | |
| | | | | in diagnosing and treating | |
| | | | | canceration of cells and cancer | |
| | | | | metastasis, and screening for the | |
| | | | | therapeutic agent. | |
| 4 | fg02936 | 1479 | Partial | A membrane protein expressed in the | Partially has a region |
| | | | sequence | nerve system. Inferred to function | having 99% homology to |
| | | | | as receptors for semaphorins, the | NOV/plexin-A1 protein |
| | | | | guidance factor to elongate neural | and has the function |
| | | | | axial filaments, thus regulating | motifs of each of Sema, |
| | | | | neuron formation. With its | Plexin_repeat, integrin_{—} |
| | | | | function to regulate the growth of | B, and TIG. |
| | | | | neural axial filaments, it is useful | |
| | | | | in diagnosing and treating a variety | |
| | | | | of neuropsychiatric diseases, or | |
| | | | | screening for the therapeutic agent. | |
| 5 | fg04068 | 258 | Partial | Encodes a guanine nucleotide | Partially has a region |
| | | | sequence | exchange factor (GEF) whose target | having 91% homology to a |
| | | | | is Rho-type GTPase. Activates Rho | neuronal guanine |
| | | | | signal by converting Rho to GTP type. | nucleotide exchange |
| | | | | The expression of the protein is high | factor, and has a PH |
| | | | | in the brain, suggesting that it is | domain motif. |
| | | | | involved in brain functions. | |
| | | | | Useful in diagnosing and treating | |
| | | | | cancer, and screening for the | |
| | | | | therapeutic agent. Also inferred | |
| | | | | to be useful in improving brain | |
| | | | | functions, since it is strongly | |
| | | | | expressed in the brain and is thought | |
| | | | | to be involved in recognition | |
| | | | | functions. | |
| 6 | fg05423 | 675 | Partial | A DNA-binding protein having a zinc | Partially has a region |
| | | | sequence | finger motif, and is a | having 51% homology to |
| | | | | transcriptional regulatory factor. | EVI1 protein, and has |
| | | | | Inferred to be a protooncogene, | zf-C2H2 motifs and a |
| | | | | similar to EVI-1, or a causative | zf-BED motif. |
| | | | | protein of osteomyelodysplasia | |
| | | | | syndrome. Thus, it is thought to be | |
| | | | | useful in diagnosing and treating | |
| | | | | cancer or osteomyelodysplasia, and | |
| | | | | in screening for the therapeutic | |
| | | | | agent. | |
| 7 | fg06344 | 248 | Partial | Inferred to synthesize acetyl | Partially has a region |
| | | | sequence | coenzyme A. The protein may be | having 60% homology to |
| | | | | useful in screening for anticancer | acetyl CoA synthetase. |
| | | | | agents and immunosuppressant | |
| | | | | agents. | |
| 8 | fg06691 | 193 | Partial | Inferred to have high homology with | Partially has a region |
| | | | sequence | an enzyme, proline dehydrogenase, | having 93% homology to |
| | | | | and has functions similar to proline | proline dehydrogenase. |
| | | | | dehydrogenase. Oxidizes proline to | |
| | | | | 1-proline-5-carboxilic acid. The | |
| | | | | deletion of the enzyme causes | |
| | | | | hyperprolinemia. Proline | |
| | | | | regulates transmission by | |
| | | | | glutamate-operated synapses, and | |
| | | | | controls neurotransmission in the | |
| | | | | brain. Elevated blood proline | |
| | | | | levels lead to abnormal sensory | |
| | | | | motor. Thus, it is useful in | |
| | | | | diagnosing and treating mental | |
| | | | | disorders due to hyperprolinemia and | |
| | | | | proline metabolic disorders. | |
| 9 | fh02216 | 373 | Partial | Has α1,2-mannosidase activity to | Partially has a region |
| | | | sequence | remove the terminal mannose of | having 100% homology to |
| | | | | Man9GlcNac2-, the precursor, formed | α1,2-mannosidase, and |
| | | | | in ER during the biosynthetic | has a Glyco_hydro_47 |
| | | | | pathways of N-glycoside-binding | motif and a sosui |
| | | | | sugar chain; and plays an important | transmembrane domain. |
| | | | | role in sugar chain synthesis of | |
| | | | | N-glycoside-binding glycoprotein. | |
| | | | | The N-glycoside-binding sugar chain | |
| | | | | functions everywhere in vivo. The | |
| | | | | deletion of the protein may cause | |
| | | | | diseases induced by deficient | |
| | | | | N-glycoside binding sugar chain. | |
| | | | | The protein is useful in treating and | |
| | | | | diagnosing these diseases. | |
| 10 | fh02982 | 215 | Partial | Regulates exocytosis, triggered by | Partially has a region |
| | | | sequence | Ca2+, of neurotransmitters in | having 68% homology to |
| | | | | synapse. Inferred to be useful in | NIM3, and has a C2 domain |
| | | | | diagnosing and treating nervous | motif. |
| | | | | diseases. | |
| 11 | fh03203 | 1134 | Partial | An extracellular matrix | Partially has a region |
| | | | sequence | glycoprotein which responds to | having 37% homology to |
| | | | | pheromone and is transcribed. | hydroxyproline-rich |
| | | | | Involved in biophylaxis. | glycoprotein DZ-HRGP. |
| 12 | fh05673 | 438 | Partial | Expressed upon cephalization to be a | Partially has a region |
| | | | sequence | guidance for the growth of neural | having 57% homology to |
| | | | | axial filaments. Not a type which | netrin-G1c and has a |
| | | | | acts by diffusion, but acts locally | laminin_Nterm motif and a |
| | | | | on the surface of a cell membrane. | laminin_EGF motif. |
| | | | | Useful in diagnosing and treating | |
| | | | | various neuropsychiatric diseases, | |
| | | | | or screening for the therapeutic | |
| | | | | agents for these diseases, since the | |
| | | | | protein regulates the growth of | |
| | | | | neural axial filaments. | |
| 13 | fh06634 | 505 | Partial | One of the proteins forming an | Partially has a region |
| | | | sequence | adaptor molecule complex which | having 100% homology to |
| | | | | transduces a signal from tyrosine | guanine |
| | | | | kinase to Ras. Functions as guanine | nucleotide-releasing |
| | | | | nucleotide-releasing factor 2 for | factor 2, and has a |
| | | | | Ras. Since the protein is involved | RasGEFN motif and a |
| | | | | in signal transduction from a | RasGEF motif. |
| | | | | receptor to Ras, it is useful in | |
| | | | | diagnosing and treating cancer | |
| | | | | through the regulation of cell | |
| | | | | proliferation, and screening for the | |
| | | | | therapeutic agent. | |
| 14 | fh08795 | 572 | Partial | Promotes GTPase activity of | Partially has a region |
| | | | sequence | Ras-related nuclear protein Ran, | having 100% homology to |
| | | | | which is involved in cell cycle; thus | Ran GTPase activating |
| | | | | promotes conversion of active | protein 1. |
| | | | | GTP-Ran to inactive GDP-Ran, thereby | |
| | | | | regulating initiation of cell | |
| | | | | mitosis. Useful in diagnosing and | |
| | | | | treating cancer, and screening for | |
| | | | | the therapeutic agent, since | |
| | | | | abnormalities in the protein can | |
| | | | | cause canceration. | |
| 15 | fh13310 | 1051 | Partial | Inferred to help the migration of | Partially has a region |
| | | | sequence | hnRNPA1 from cytoplasms to nuclei by | having 98% homology to |
| | | | | binding to hnRNPA1, which is a | karyopherinβ2b, |
| | | | | protein controlling mRNA processing | transportin, and has |
| | | | | and the transport of mRNA from nuclei | Armadillo_seg motifs and |
| | | | | to cytoplasms. Useful in | HEAT motifs. |
| | | | | diagnosing and treating cancer by | |
| | | | | regulating the gene. | |
| 16 | fh18356 | 887 | Partial | Inferred to be a factor which is | Partially has a region |
| | | | sequence | induced in blastocysts by | having 94% homology to |
| | | | | parathyroid hormone, and involved in | PTH-responsive |
| | | | | the activation of blastocysts by | osteosarcome B1 protein. |
| | | | | parathyroid hormone and | |
| | | | | osteogenesis. Useful in diagnosing | |
| | | | | and treating bone diseases, such as | |
| | | | | osteoporosis and a variety of | |
| | | | | cancers, and screening for the | |
| | | | | therapeutic agent for these | |
| | | | | diseases. | |
| 17 | fh18358 | 689 | Partial | Promotes the formation of | Partially has a region |
| | | | sequence | CDC25c/14-3-3 protein complex by | having 64% homology to |
| | | | | phosphorylating Ser216 of | Cdc25C associated |
| | | | | CDC25c; and regulates the initiation | protein kinase C-TAK1, |
| | | | | of cell mitosis through the complex. | and has a pkinase motif |
| | | | | Useful in diagnosing and treating | and a UBA motif. |
| | | | | cancer and screening for the | |
| | | | | therapeutic agent, since it is | |
| | | | | involved in the regulation of cell | |
| | | | | division. | |
| 18 | fh20539 | 1004 | Partial | Has the ankyrin repeat and is | Partially has a region |
| | | | sequence | involved in protein interaction. | having 35% homology to |
| | | | | Useful in treating cystic fibrosis, | FRANK2 protein, and has |
| | | | | since it is involved in regulating | ank repeat motifs. |
| | | | | CFTR expression. | |
| 19 | fh22167 | 761 | Partial | Serine/threonine kinase in the | Partially has a region |
| | | | sequence | intracellular signal transduction | having 30% homology to |
| | | | | system. Useful in screening a drug | protein kinase WNK1. |
| | | | | for diseases which involve the | |
| | | | | signal transduction system. | |
| 20 | fh23421 | 480 | Partial | A nuclear protein involved in mRNA | Has 97% homology to a |
| | | | sequence | splicing. Concentrated in portions | putative splicing |
| | | | | referred to as nuclear TY body, and | factor, YT521-B. |
| | | | | inferred to provide a site for mRNA | |
| | | | | splicing. Useful in diagnosing and | |
| | | | | treating cancer, and screening for | |
| | | | | the therapeutic agent, since it is | |
| | | | | involved in regulating expression | |
| | | | | and cell proliferation. Also | |
| | | | | useful in the field of regeneration | |
| | | | | medicine. | |
| 21 | fh24594 | 762 | Partial | Involved in binding synaptosome | Partially has a region |
| | | | sequence | binding protein (SNAP-25) to the | having 94% homology to |
| | | | | cytoskeleton, and regulating | SNAP-25-interacting |
| | | | | exocytosis. Useful in diagnosing, | protein, and has a |
| | | | | preventing and treating nervous | Troponin motif. |
| | | | | diseases, since it is involved in | |
| | | | | regulating the release of | |
| | | | | neurotransmitters. | |
| 22 | fh26207 | 1094 | Partial | A GnRH-like decapeptide precursor | Partially has a region |
| | | | sequence | acting as gonadotropin releasing | having 98% homology to |
| | | | | hormone. Useful in diagnosing, | putative preoptic |
| | | | | preventing and treating | regulatory factor-2 |
| | | | | abnormalities in sex hormones, such | precursor. |
| | | | | as infertility and cancer. | |
| 23 | fj00154 | 388 | Partial | An enzyme which substitutes | Partially has a region |
| | | | sequence | adenosine residue 37 of alanine tRNA | having 99% homology to |
| | | | | with an inosine residue. Useful in | adenosine deaminase |
| | | | | preventing, treating and diagnosing | acting on tRNA 1, and has |
| | | | | diseases involved in modifying, such | A_deamin motifs. |
| | | | | as tRNA. | |
| 24 | fj00597s1 | 523 | Full | Inferred to transport iron or other | Partially has a region |
| | | | length | divalent cations or to function as a | having 39% homology to |
| | | | | membrane-binding receptor. For | TTYH1, and has sosui |
| | | | | example, iron metabolic disorders | transmembrane motifs. |
| | | | | cause blood diseases, such as | |
| | | | | anemia, the disease of nervous | |
| | | | | degeneration and the like. Thus it | |
| | | | | is useful in diagnosing and treating | |
| | | | | such diseases by detecting and | |
| | | | | regulating the expression and the | |
| | | | | function of the protein. | |
| 25 | fj03879s1 | 1653 | Partial | Acts on protein interaction since it | Partially has a region |
| | | | sequence | has a PH domain. Inferred to act on | having 44% homology to |
| | | | | the morphological changes in | P116 RHO-interacting |
| | | | | neurons. Also inferred to inhibit | protein (P116RIP) |
| | | | | cell expansion and the elongation of | (RIP3), and has a PH |
| | | | | neurons by acting on Rho. Useful in | domain motif. |
| | | | | diagnosing and treating nervous | |
| | | | | diseases and cancer, and screening | |
| | | | | for the therapeutic agents for these | |
| | | | | diseases by regulating the gene. | |
| 26 | fj04226 | 959 | Partial | A microtubule-associated protein | Partially has a region |
| | | | sequence | which regulates microtubule | having 61% homology to |
| | | | | kinetics and interaction between | microtubule-associated |
| | | | | microtubules and other | protein 4, and has |
| | | | | intracellular molecules. With the | tubulin-binding motifs. |
| | | | | strong involvement of a | |
| | | | | microtubule-associated protein in | |
| | | | | cancer and Alzheimer's disease, the | |
| | | | | protein, a putative member of the | |
| | | | | protein family, is useful in | |
| | | | | diagnosing and treating these | |
| | | | | diseases. | |
| 27 | fj04751 | 878 | Full | A protein which binds to oxysterol, | Partially has a region |
| | | | length | and plays an important role in | having 60% homology to |
| | | | | regulating cholesterol metabolism. | oxysterol-binding |
| | | | | Useful in diagnosing and treating | protein, and has a PH |
| | | | | cardiovascular diseases caused by | domain and an |
| | | | | abnormalities in cholesterol | Oxysterol_Bp motif. |
| | | | | metabolism, and screening for the | |
| | | | | drug. | |
| 28 | fj05456 | 281 | Partial | Inferred to act as a cytoskeleton | Partially has a region |
| | | | sequence | factor in neurons of the brain. | having 32% homology to a |
| | | | | This protein has 5 kelch motifs, | ring canal protein, and |
| | | | | while Gigaxonin (mutated Gigaxonin | has Kelch motifs. |
| | | | | is found in giant axonal neuropathy) | |
| | | | | has the BTB domain and 6 Kelch | |
| | | | | motifs. The protein is useful in | |
| | | | | diagnosing and treating giant axonal | |
| | | | | neuropathy and degenerative | |
| | | | | disorders in the nervous system | |
| | | | | (e.g., amyotrophic lateral | |
| | | | | sclerosis, amyotrophy, | |
| | | | | charcot-Marie-tooth disease). | |
| 29 | fj06918 | 707 | Partial | Present in neurons, and co-exists | Partially has a region |
| | | | sequence | with ion channels. Involved in | having 46% homology to a |
| | | | | differentiation of the functional | cell recognition |
| | | | | domain of axial filaments. Useful | molecule, Caspr2, and has |
| | | | | in treating, preventing, and | laminin_G motifs and an |
| | | | | diagnosing nervous diseases, and | EGF motif. |
| | | | | screening for the therapeutic agent. | |
| 30 | fj08985 | 341 | Partial | A protein having a motif which binds | Partially has a region |
| | | | sequence | to GTP-Rho, and which plays a role in | having 80% homology to |
| | | | | transducing Rho signal to other | GTP-rho binding protein |
| | | | | proteins. Involved in the regulation | 1, and has a BRO1 motif. |
| | | | | of the cytoskeleton which is based on | |
| | | | | actin, the contraction of the smooth | |
| | | | | muscle, transcription, cell | |
| | | | | proliferation, and the regulation of | |
| | | | | cell cycle. Useful in diagnosing | |
| | | | | and treating diseases caused by | |
| | | | | abnormalities in the cytoskeleton | |
| | | | | and morphogenesis, and cancer, and | |
| | | | | screening for the therapeutic agent. | |
| 31 | fj10564 | 531 | Partial | An isozyme of phosphoenzyme which | Partially has a region |
| | | | sequence | converts inositol triphosphate to | having 100% homology to |
| | | | | inositol tetraphosphate. | inositol1, 4,5- |
| | | | | Regulates intracellular calcium | triphosphate3-kinase |
| | | | | levels and is involved in signal | (IP3K). |
| | | | | transduction. Expressed in the | |
| | | | | hippocampus. Useful in screening | |
| | | | | for an agent selectively acting on | |
| | | | | the inositol phosphate pathway. | |
| 32 | fj11471 | 1199 | Partial | Has domains involved inhistogenesis | Partially has a region |
| | | | sequence | and development of extremities. | having 37% homology to |
| | | | | Possible involvement in cell | FH1/FH2 |
| | | | | localization, cell division and the | domain-containing |
| | | | | regulation of the cytoskeleton. | protein FHOS, and has a |
| | | | | High expression of this protein in | FH2 motif. |
| | | | | the spleen suggests its involvement | |
| | | | | in maturation and development of B | |
| | | | | cells and erythrocytes. Useful in | |
| | | | | diagnosing and treating diseases | |
| | | | | caused by cell or tissue | |
| | | | | development, morphogenesis and | |
| | | | | maturation, and in regeneration | |
| | | | | medicine. | |
| 33 | fj12188 | 449 | Partial | Regulates the binding and fusion of | Partially has a region |
| | | | sequence | synaptic vesicles at the synaptic | having 51% homology to |
| | | | | termini in the brain. Useful in | serine/threonine- |
| | | | | treating and diagnosing diseases | protein kinase DCAMKL1, |
| | | | | with abnormalities in neural | and has a pkinase motif. |
| | | | | transmission. | |
| 34 | fj14406 | 1354 | Partial | A motor molecule which converts ATP | Partially has a region |
| | | | sequence | (chemical energy) into physical | having 37% homology to 1 |
| | | | | force so as to move along | β dynein heavy chain, |
| | | | | microtubules. While dyneins | and has a Dynein_heavy |
| | | | | involved in mitosis, vesicle | motif. |
| | | | | transport, and the movement of cilia | |
| | | | | and fragella exist as multisubunit | |
| | | | | complexes, the protein functions as | |
| | | | | 1β dynein heavy chain which is a | |
| | | | | component of the complex. Useful in | |
| | | | | diagnosing and treating cancer, and | |
| | | | | screening for the therapeutic agent. | |
| | | | | Also useful in diagnosing cranial | |
| | | | | nerve diseases, such as | |
| | | | | hydrencephaly, infertility and | |
| | | | | respiratory apparatus-related | |
| | | | | diseases. | |
| 35 | fj15278 | 966 | Partial | Involved in regulation of binding | Has 95% homology to |
| | | | Sequence | and fusion of synaptic vesicles to | rsec8. |
| | | | | pre-synaptic membranes. A | |
| | | | | component of a complex involved in | |
| | | | | neural transmission. Useful in | |
| | | | | treating and diagnosing diseases | |
| | | | | with abnormalities in neural | |
| | | | | transmission. | |
| 36 | fj16085s1 | 1766 | Partial | Regulates cell differentiation and | Partially has a region |
| | | | sequence | cell proliferation by interacting | having 57% homology to |
| | | | | with proteins having the SET domain. | nuclear dual-specificity |
| | | | | Useful in diagnosing and treating | phosphatase, and has a |
| | | | | cancer, and screening for the | DENN, a GRAM and a PH |
| | | | | therapeutic agent. | domain motif. |
| 37 | fj17028 | 498 | Partial | Produces phospholipids, the second | Partially has a region |
| | | | sequence | messenger, and involved in | having 95% homology to |
| | | | | intracellular reactions including | phosphatidic |
| | | | | production of hyperoxides in | acid-preferring |
| | | | | neutrophils, actin polymerization | phospholipase A1, and has |
| | | | | and the like. Useful in diagnosing | a DDHD motif. |
| | | | | and treating infectious diseases, | |
| | | | | inflammation and immune diseases, | |
| | | | | and screening for the drug. | |
| 38 | fj17066 | 389 | Full | Regulates the expression of homeotic | Partially has a region |
| | | | length | genes by modifying the structure of | having 87% homology to |
| | | | | chromosomes, and inhibits | chromobox homolog 8, and |
| | | | | (functions to perform silencing) | has a chromo motif. |
| | | | | gene expression. Useful in | |
| | | | | diagnosing and treating cancer, and | |
| | | | | screening for the therapeutic agent. | |
| | | | | Also useful in gene diagnosis of | |
| | | | | malformation, teratogeny and the | |
| | | | | like, and in the field of | |
| | | | | regeneration medicine. | |
| 39 | gh01817b | 380 | Partial | Dissociates a transcribed complex | Partially has a region |
| | | | sequence | from a template. Can be used for | having 92% homology to |
| | | | | analyzing the transcriptional | polymerase I and a |
| | | | | mechanism. | transcript release |
| | | | | | factor. |
| 40 | gh13812 | 360 | Partial | A regulatory subunit of phosphatase | Partially has a region |
| | | | sequence | which regulates the activity of a | having 93% homology to |
| | | | | pyruvate dehydrogenase complex. | pyruvate dehydrogenase |
| | | | | Useful in diagnosing and treating | phosphatase regulatory |
| | | | | cancer, and screening for the | subunit precursor, and |
| | | | | therapeutic agent. Also useful in | has a GCV_T motif. |
| | | | | screening for an antiobestic drug. | |
| 41 | hh05136b | 832 | Partial | A homologue of collagen V precursor. | Partially has a region |
| | | | sequence | Collagen V plays an important role in | having 46% homology to |
| | | | | forming extracellular matrix. | collagen α1 (V) chain |
| | | | | Useful in diagnosing cirrhosis, and | precursor, and has |
| | | | | as biological base materials in | Collagen motifs and COLFI |
| | | | | regeneration medicine. | motifs. |
| 42 | hh05356 | 370 | Partial | Forms a spindle during cell | Partially has a region |
| | | | sequence | division, and delivers chromosomes | having 97% homology to |
| | | | | to daughter cells. Involved in | tubulin β-5 chain (β- |
| | | | | constructing and maintaining the | tubulin class-V). |
| | | | | three-dimensional structure of a | |
| | | | | cytoplasm together with actin fibers | |
| | | | | and intermediate filaments. Useful | |
| | | | | in diagnosing and treating cancer, | |
| | | | | and screening for the therapeutic | |
| | | | | agent. | |
| 43 | hh10052 | 412 | Partial | Inferred to be the gene product of a | Partially has a region |
| | | | sequence | novel human cartilage link protein | having 49% homology to |
| | | | | family, which is important in | proteoglycan link |
| | | | | differentiation and proliferation | protein precursor |
| | | | | of cartilage cells. Useful in | (cartilage link |
| | | | | regeneration of the cartilage. | protein), and has an ig |
| | | | | | motif and Xlink motifs. |
| 44 | hh13045 | 803 | Partial | Inferred to be novel cadherin | Partially has a region |
| | | | sequence | molecules, since they have cadherin | having 30% homology to |
| | | | | repeats. Involved in cell | FAT tumor suppressor, and |
| | | | | adhesion. Possible involvement in | has cadherin motifs. |
| | | | | segregation of cancer cells from | |
| | | | | primary layers and infiltrationwith | |
| | | | | cancer cells. Useful in diagnosing | |
| | | | | and treating cancer, and screening | |
| | | | | for the therapeutic agent. Also | |
| | | | | useful as a marker for renal | |
| | | | | diseases, because of its high | |
| | | | | expression in kidney. | |
| 45 | hh14180 | 1036 | Full | (Threonin)-0-binding | Has a region having 99% |
| | | | length | N-acetylglucosamine transferase, | homology to |
| | | | | which controls activities of various | N-acetylglucosaminyl |
| | | | | proteins including a transcription | transferase 110 KDA |
| | | | | factor, a nuclear membrane protein, | subunit, and has TPR |
| | | | | a cytoskeletal protein and a | motifs. |
| | | | | cancer-related protein within the | |
| | | | | nucleus and cytoplasm. Useful in | |
| | | | | diagnosing and treating various | |
| | | | | diseases, such as cancer, and | |
| | | | | screening for the therapeutic agent. | |
| 46 | hj02562 | 277 | Partial | A protein which may function as a | Has a region having 88% |
| | | | sequence | co-activator in RNA polymerase II | homology to PC2 glutamine |
| | | | | complexes. Possible involvement in | rich binding protein. |
| | | | | cranial nerve diseases, such as | |
| | | | | Alzheimer's disease and | |
| | | | | Parkinson's disease, because they | |
| | | | | have glutamate repeats. Useful in | |
| | | | | diagnosing cranial nerve diseases, | |
| | | | | such as Alzheimer's disease and | |
| | | | | Parkinson's disease, and as a | |
| | | | | target therapeutic agent to be | |
| | | | | developed. | |
| 47 | hj03865 | 1115 | Partial | Has 98% homology to a | Partially has a region |
| | | | sequence | huntingtin-associated protein | having 98% homology to |
| | | | | interacting protein (HAPIP) which | huntingtin-associated |
| | | | | binds to a protein (Duo) binding to | protein interacting |
| | | | | huntingtin, the cause of | protein, and has a RhoGEF |
| | | | | Huntington's chorea. High | and a PH domain motif. |
| | | | | expression in the brain. UNC-73, | |
| | | | | the C. elegans homologue of HAPIP, | |
| | | | | has been shown to involve axonal | |
| | | | | guidance. Suggested to be involved | |
| | | | | in signal transduction, because it | |
| | | | | has the RhoGEF motif. Inferred to | |
| | | | | be useful in diagnosing and treating | |
| | | | | Huntington's chorea. Useful as a | |
| | | | | target gene for developing an agent | |
| | | | | for nerve regeneration because of | |
| | | | | the involvement in axonal guidance. | |
| 48 | hj05256 | 783 | Partial | Inferred to be a transcription | Partially has a region |
| | | | sequence | factor, since the protein has the | having 48% homology to |
| | | | | zinc finger motif. A deletion or a | zinc finger protein 91, |
| | | | | mutation in the protein may cause | and has zf-C2H2 motifs. |
| | | | | abnormalities in morphogenesis and | |
| | | | | cell proliferation. Detection of a | |
| | | | | mutation in the gene is useful in | |
| | | | | diagnosing cancer, and introduction | |
| | | | | of the normal gene is useful in | |
| | | | | treating cancer. | |
| 49 | hk02174 | 797 | Partial | A protein, which is accumulated in | Partially has a region |
| | | | sequence | significant amount in the | having 94% homology to |
| | | | | post-synaptic density of excitable | proline rich synapse |
| | | | | synapses. Inferred to be a gene | associated protein 2, and |
| | | | | encoding a protein which anchors | has a SAM motif. |
| | | | | SAP90/PSD-95, the scaffold for a | |
| | | | | membrane receptor, to the | |
| | | | | cytoskeleton in synapses using | |
| | | | | glutamate in the central nerve | |
| | | | | system. | |
| | | | | The protein may have influence on the | |
| | | | | generation of the neural network, | |
| | | | | and establishment of memory and | |
| | | | | learning. Useful in diagnosing | |
| | | | | various neuropsychiatric disorders, | |
| | | | | and screening for the therapeutic | |
| | | | | agent. | |
| 50 | pf00330s1 | 1043 | Full | A protein, the scaffold for ephr in B, | Partially has a region |
| | | | length | which plays an important role by | having 87% homology to |
| | | | | guiding axial filaments in the | glutamate receptor |
| | | | | embryogenesis, to form a complex | interacting protein 2, |
| | | | | that transduces signal. Inferred | and has PDZ motifs. |
| | | | | to involve neural circuit formation. | |
| | | | | Useful in gene diagnosis and the | |
| | | | | field of regeneration medicine. | |
| 51 | pf00447 | 421 | Partial | It may bind to a protein having the | Partially has a region |
| | | | sequence | SH3 domain, because the protein is | having 41% homology to |
| | | | | homologous to SH3-domain binding | SH3-domain binding |
| | | | | protein. Since the protein having | protein 5 |
| | | | | the SH3-domain is often involved in | (BTK-associated). |
| | | | | intracellular signal transduction, | |
| | | | | it can be inferred that the protein | |
| | | | | has similar functions. Useful in | |
| | | | | diagnosing and treating cancer, and | |
| | | | | screening for the therapeutic agent. | |
| 52 | pg00239 | 1644 | Partial | Inferred to perform protein | Partially has a region |
| | | | sequence | interaction, since the protein has | having 30% homology to |
| | | | | the ankyrin repeat. Possible | ankyrin 3, and has ank |
| | | | | involvement in signal transduction | repeat motifs. |
| | | | | and transcriptional control. | |
| | | | | Useful in diagnosing and treating | |
| | | | | cancer, and screening for the | |
| | | | | therapeutic agent. | |
| 53 | pg00264 | 534 | Partial | Inferred to be sialyltransferase, | Partially has a region |
| | | | sequence | and involve post-translational | having 54% homology to |
| | | | | modification of protein. Useful in | CMP-N-acetylneuraminate- |
| | | | | treating, preventing and diagnosing | β-galactosamide-α-2, |
| | | | | cancer, and screening for the drug. | 6-siaryltransferase, and |
| | | | | Also useful in modifying the sugar | has a sosui transmembrane |
| | | | | chain of a recombinant protein, | motif and a |
| | | | | similar to a human type. | Glyco_transf_29 motif. |
| 54 | pg00933 | 1768 | Partial | A motor molecule which converts ATP | Partially has a region |
| | | | sequence | (chemical energy) into physical | having 98% homology to |
| | | | | force so as to move along | ubiqutinating enzyme |
| | | | | microtubules. While dyneins | E2-230 kDa. |
| | | | | involved in mitosis, vesicle | |
| | | | | transport, and the movement of cilia | |
| | | | | and fragella exist as multisubunit | |
| | | | | complexes, the protein functions as | |
| | | | | 1β dynein heavy chain which is a | |
| | | | | component of the complex. Useful in | |
| | | | | diagnosing and treating cancer, and | |
| | | | | screening for the therapeutic agent. | |
| | | | | Also useful in diagnosing cranial | |
| | | | | nerve diseases, such as | |
| | | | | hydrencephaly, infertility and | |
| | | | | respiratory apparatus-related | |
| | | | | diseases. | |
| 55 | ph00331 | 1313 | Partial | Inferred to be ubiquitin-binding | Partially has a region |
| | | | sequence | enzyme. It is known that with an | having 73% homology to |
| | | | | abnormal ubiquitinating process, | dynein heavy chain |
| | | | | cells are unable to differentiate | isotype 6. |
| | | | | and proliferate, inducing various | |
| | | | | diseases including cancer and | |
| | | | | Parkinson's disease. Useful in | |
| | | | | screening for the therapeutic agent | |
| | | | | of these diseases. | |
| 56 | pj01645 | 765 | Partial | Inferred to be a gene involved in | Partially has a region |
| | | | sequence | cilia formation. Useful in | having 76% homology to |
| | | | | diagnosing and treating respiratory | KPL2. |
| | | | | diseases and cilia dysfunction. | |
| 57 | pj01649 | 439 | Full | Many microtubule-binding proteins | Partially has a region |
| | | | length | are present in neurons, and involve | having 58% homology to |
| | | | | neural axial filament formation. | putative |
| | | | | Therefore abnormal | microtubule-associated |
| | | | | microtubule-binding proteins affect | protein. |
| | | | | neurogenesis and cause malformation | |
| | | | | and teratogeny. Useful in | |
| | | | | diagnosing and treating cancer, and | |
| | | | | screening for the therapeutic agent. | |
| | | | | Also useful in gene diagnosis of | |
| | | | | congenital diseases and the field of | |
| | | | | nerve regeneration medicine. | |
| 58 | bf00083 | 879 | Full | A pyruvate dehydrogenase | Has a region having 91% |
| | | | length | phosphatase activity regulatory | homology to pyruvate |
| | | | | subunit. Inferred to involve | dehydrogenase |
| | | | | regulating sugar metabolism. | phosphatase regulatory |
| | | | | Useful in diagnosing and treating | subunit precursor, and |
| | | | | cancer, and screening for the | has a DAO, a Phytoene_dh |
| | | | | therapeutic agent. Also useful in | and a GCV_T motifs. |
| | | | | screening for an antiobestic agent. | |
| 59 | bf00135 | 699 | Partial | Kinesin light chain, the motor | Partially has a region |
| | | | sequence | protein which moves along | having 36% homology to |
| | | | | microtubules. Inferred to involve | kinesin light chain, and |
| | | | | the intracellular transport of | has TPR motifs. |
| | | | | substances. Directly binds amyloid | |
| | | | | protein precursor (APP), the | |
| | | | | causative agent of Alzheimer with | |
| | | | | substances, so as to transport the | |
| | | | | substances along neural axial | |
| | | | | filaments in neurons. Useful in | |
| | | | | preventing diseases involved in the | |
| | | | | intracellular transport of | |
| | | | | substances; and diagnosing and | |
| | | | | treating Alzheimer, and screening | |
| | | | | for the therapeutic agent. | |
| 60 | bg00184 | 1179 | Partial | A novel transcription factor. Many | Partially has a region |
| | | | sequence | of them are present as a nuclear | having 99% homology to |
| | | | | protein in the cerebellum. Useful | TFNR. |
| | | | | in diagnosing and treating cancer, | |
| | | | | and screening for the therapeutic | |
| | | | | agent. | |
| 61 | bj00061 | 802 | — | A protein analogous to endozepine, | Partially has a region |
| | | | | the ligand of the receptor of | having 80% homology to |
| | | | | benzodiazepine which is classified | endodiazepine-related |
| | | | | as an antianxiety agent or sedative | protein precursor, and |
| | | | | drug/hypnotics. Useful as an | has an ACBP motif and a |
| | | | | analgesic agent, antianxiety agent | sosui transmembrane |
| | | | | and anticonvulsant in diagnosing, | motif. |
| | | | | preventing and treating nervous | |
| | | | | diseases. | |
| 62 | bj00195 | 1194 | Partial | Type 1 hexokinase, which is | Partially has a region |
| | | | sequence | transcribed upon spermatogenesis. | having 94% homology to |
| | | | | The protein is present in the | cytoplasmic dynein heavy |
| | | | | acrosome of a sperm, and functions as | chain 2. |
| | | | | a receptor for ZP3 protein, the | |
| | | | | pellucid zone of an egg, upon | |
| | | | | fertilization. Useful in | |
| | | | | discriminating the maturity of | |
| | | | | sperms and suppressing the function | |
| | | | | of sperm. Also useful in diagnosing | |
| | | | | and treating infertility, and | |
| | | | | contraception. | |
| 63 | fg01285 | 1560 | Partial | A protein analogous to myosin, which | Partially has a region |
| | | | sequence | is involved in intracellular | having 35% homology to |
| | | | | transport and induces dysgenic | myosin XV, and has a |
| | | | | congenital asymptomatic auditory | myosin_head motif and a |
| | | | | disorder DFNB3. Useful in | MyTH4 motif. |
| | | | | preventing, diagnosing and treating | |
| | | | | nervous diseases involving | |
| | | | | intracellular transport. Also | |
| | | | | useful in the filed of medicine of | |
| | | | | nerve regeneration. | |
| 64 | fh17057 | 958 | Partial | Inferred to be breakpoint cluster | Present on chromosome 14, |
| | | | sequence | region protein 2, the product of a | partially has a region |
| | | | | house keeping gene which encodes a | having 99% homology to |
| | | | | protein necessary for cell | breakpoint cluster |
| | | | | survival. Useful in diagnosing | region protein 2, and has |
| | | | | and treating cancer, and screening | WD40 motifs. |
| | | | | for the therapeutic agent. | |
| 65 | ha06731 | 715 | Partial | An analogous protein of HrPOPK-1, | Partially has a region |
| | | | sequence | which is inferred to have | having 51% homology to |
| | | | | serine/threonine kinase activity, | HrPOPK-1, and has a sosui |
| | | | | and have regulatory functions in | transmembrane motif. |
| | | | | generation/differentiation, such as | |
| | | | | determination of the embryonic axis. | |
| | | | | Useful in gene diagnosis of | |
| | | | | congenital abnormalities and | |
| | | | | teratogeny, and in the field of | |
| | | | | regeneration medicine. Further, | |
| | | | | useful in diagnosing and treating | |
| | | | | cancer, and screening for the | |
| | | | | therapeutic agent. | |
| 66 | hj05226 | 105 | — | Homologous to a part of EGF-like | Partially has a region |
| | | | | domains in a protein (MEGF) having | having 52% homology to |
| | | | | many EGF-like domains. It is known | MEGF6, and has EGF |
| | | | | that mutations in the domains affect | motifs. |
| | | | | cell-to-cell interaction in the | |
| | | | | brain and ligand-receptor | |
| | | | | interaction, so as to cause auxesis | |
| | | | | of the nerve system or | |
| | | | | disorganization of the brain cortex, | |
| | | | | thus induces dementia or the like. | |
| | | | | Useful in diagnosing and treating | |
| | | | | diseases of the brain and the nervous | |
| | | | | system. | |
| 67 | pf01012 | 1192 | — | Homologous to a part of EGF-like | Partially has a region |
| | | | | domains in a protein (MEGF) having | having 32% homology to |
| | | | | many EGF-like domains. It is known | MEGF6, and has EGF |
| | | | | that mutations in the domains affect | motifs. |
| | | | | cell-to-cell interaction in the | |
| | | | | brain and ligand-receptor | |
| | | | | interaction, so as to cause auxesis | |
| | | | | of the nerve system or | |
| | | | | disorganization of the brain cortex, | |
| | | | | thus induces dementia or the like. | |
| | | | | Useful in diagnosing and treating | |
| | | | | diseases of the brain and the nervous | |
| | | | | system. | |
| 68 | fg02852 | 350 | Partial | An analogous protein of p150-Spir | Partially has a region |
| | | | sequence | protein which regulates | having 42% homology to |
| | | | | reconstruction of actin by being | p150-Spir protein. |
| | | | | phosphorylated with | |
| | | | | stress-responsive phosphoenzyme | |
| | | | | JNK. Useful in diagnosing and | |
| | | | | treating cancer, and screening for | |
| | | | | the therapeutic agent. | |
| 69 | fh21913a | 244 | Partial | A protein analogous to fibrillin | Partially has a region |
| | | | sequence | which is a major component of a thin | having 74% homology to |
| | | | | fiber network formed by assembly of | fibrillin 5, and has EGF |
| | | | | elastin proteins and is present | motifs and a TB motif. |
| | | | | extensively over the connective | |
| | | | | tissue. With its possible | |
| | | | | involvement in a hereditary disease, | |
| | | | | Marfans syndrome, associated with | |
| | | | | cardiovascular and visual | |
| | | | | disorders, it is useful in the | |
| | | | | diagnosis and the treatment. | |
| 70 | fj22564 | 1299 | — | A protein having C2H2 type zinc | Partially has a region |
| | | | | finger motifs. One of intranuclear | having 96% homology to |
| | | | | proteins expressed in embryonic stem | zinc finger protein and |
| | | | | cells. Inferred to involve | has zf-C2H2 motifs. |
| | | | | development, differentiation and | |
| | | | | proliferation. With possible | |
| | | | | involvement in development of early | |
| | | | | embryos, it is inferred to involve | |
| | | | | cell proliferation or | |
| | | | | differentiation. Thus it is useful | |
| | | | | in diagnosing and treating cancer, | |
| | | | | and screening for the therapeutic | |
| | | | | agent. Also it is useful in | |
| | | | | regeneration medicine or gene | |
| | | | | diagnosis of congenital | |
| | | | | abnormalities and teratogeny. | |

(3) Homology Search for the DNA of the Present Invention

[0102] Next, based on the thus obtained full-length nucleotide sequences, the amino acid sequences of the clones were searched on the library of known sequences, nr release 122, using an analysis program BLASTP 2.0.14 (the above-mentioned “Gapped BLAST and PSI-BLAST: a new generation of protein database search programs”). Thus, it was shown that the clones were homologous to each homologous genes listed in Table 2. Table 2 shows the information on these homologous genes, specifically, the name, database ID, biological species, nomenclature, protein length and the literature containing the information.

TABLE 2
Homologous Gene of Each Gene and Biological Species

| SEQ | Homologous gene | | | | |
|---|---|---|---|---|---|
| ID | | Database | Biological | Protein | |
| NO: | Name | ID | species^{※} | length | Literature |
| 1 | coronin, actin binding protein | gi\|6753496 | Mouse | 474 | DNA Cell Biol. 17 (9), |
| | 1C | | | | 779-787 (1998) |
| 2 | zinc finger protein 91 | gi\|4508041 | Human | 1191 | Proc. Natl. Acad. Sci. |
| | | | | | U.S.A. 88 (9), |
| | | | | | 3608-3612 (1991) |
| 3 | immunoglobulin superfamily | gi\|7657226 | Human | 442 | Genomics 62 (2), |
| | | | | | 139-146 (1999) |
| 4 | NOV/plexin-A1 protein | emb\|CAB57274.1\| | Human | 1754 | Proc. Natl. Acad. Sci. |
| | | | | | U.S.A. 93 (2), 674-678 |
| | | | | | (1996) |
| 5 | neuronal guanine nucleotide | gi\|9845277 | Mouse | 554 | Genomics 65 (1), 53-61 |
| | exchange factor | | | | (2000) |
| 6 | EVI1 protein | pir\|\|S41705 | Human | 1042 | EMBO J. 13 (3), |
| | | | | | 504-510 (1994) |
| 7 | acetyl-coenzyme A synthetase | gb\|AAG08119.1\|AE004887_3 | Bacillus of green pus | 645 | Nature 406 (6799), |
| | | | | | 959-964 (2000) |
| 8 | proline dehydrogenase | gb\|AAD24775.1\|AF120278_1 | Human | 516 | Nat. Genet. 21 (4), |
| | | | | | 434-439 (1999) |
| 9 | alpha 1,2-mannosidase | gi\|7706437 | Human | 699 | Glycobiology 9 (10), |
| | | | | | 1073-1078 (1999) |
| 10 | NIM3 | gb\|AAF81657.1\|AF199335_1 | Rat | 285 | J. Biol. Chem. 275 |
| | | | | | (26), 20033-20044 |
| | | | | | (2000) |
| 11 | hydroxyproline-rich | emb\|CAB62280.1\| | Volvox | 409 | J. Biol. Chem. 274 |
| | glycoprotein DZ-HRGP | | | | (49), 35023-35028 |
| | | | | | (1999) |
| 12 | Netrin-G1c | dbj\|BAB12008.1\| | Mouse | 438 | J. Neurosci. 20 (17), |
| | | | | | 6540-6550 (2000) |
| 13 | guanine nucleotide-releasing | gi\|4885357 | Human | 1077 | Proc. Natl. Acad. Sci. |
| | factor 2 | | | | U.S.A. 91 (8), |
| | | | | | 3443-3447 (1994) |
| 14 | Ran GTPase activating protein 1 | gi\|4506411 | Human | 587 | Proc. Natl. Acad. Sci. |
| | | | | | U.S.A. 91 (7), |
| | | | | | 2587-2591 (1994) |
| 15 | karyopherin beta 2b, | gi\|7305595 | Human | 887 | J. Cell Biol. 138 |
| | transportin | | | | (6), 1181-1192 (1997) |
| 16 | PTH-responsive osteosarcoma | gb\|AAD25981.1\|AF095771_1 | Human | 802 | Bone 24 (4), 305-313 |
| | B1 protein | | | | (1999) |
| 17 | Cdc25C associated protein | gb\|AAC15093.1\| | Human | 729 | Cell Growth Differ. 9 |
| | kinase C-TAK1 | | | | (3), 197-208 (1998) |
| 18 | FRANK2 protein | emb\|CAB96906.1\| | Hawaii's | 1596 | Genome Res. 10 (8), |
| | | | sea urchin | | 1194-1203 (2000) |
| 19 | protein kinase WNK1 | gb\|AAF74258.1\|AF227741_1 | Rat | 2126 | J. Biol. Chem. 275 |
| | | | | | (22), 16795-16801 |
| | | | | | (2000) |
| 20 | putative splicing factor | gb\|AAD55973.1\|AF144731_1 | Rat | 738 | Mol. Biol. Cell 10 |
| | YT521-B | | | | (11), 3909-3926 |
| | | | | | (1999) |
| 21 | SNAP-25-interacting protein | gi\|9507127 | Rat | 1197 | J. Biol. Chem. 275 |
| | | | | | (2), 1191-1200 (2000) |
| 22 | PUTATIVE PREOPTIC REGULATORY | sp\|P18890\|PRF2_{—} | Rat | 75 | Mol. Endocrinol. 4 |
| | FACTOR-2 PRECURSOR | | | | (8), 1205-1210 (1990) |
| 23 | adenosine deaminase acting on | gi\|6912230 | Human | 502 | Proc. Natl. Acad. Sci. |
| | tRNA 1 | | | | U.S.A. 96 (16), |
| | | | | | 8895-8900 (1999) |
| 24 | TTYH1 | gb\|AAG02580.1\|AF177909_1 | Human | 450 | Genomics 68 (1), |
| | | | | | 89-92 (2000) |
| 25 | P116 RHO-INTERACTING PROTEIN | sp\|P97434\|RIP3 | Mouse | 1024 | J. Cell Biol. 137 (7), |
| | (P116RIP) (RIP3) | | | | 1603-1613 (1997) |
| 26 | microtubule-associated | gi\|4505099 | Human | 1152 | Cell Motil. |
| | protein 4 | | | | Cytoskeleton 23 (4), |
| | | | | | 236-243 (1992) |
| 27 | OXYSTEROL-BINDING PROTEIN | sp\|P16258\|OXYB | Rabbit | 809 | J. Biol. Chem. 264 |
| | | | | | (28), 16798-16803 |
| | | | | | (1989) |
| 28 | ring canal protein | gb\|AAA53472.2\| | Fruit fly | 1477 | Cell 72 (5), 681-693 |
| | | | | | (1993) |
| 29 | cell recognition molecule | gi\|7662350 | Human | 1331 | Neuron 24 (4), |
| | Caspr2 | | | | 1037-1047 (1999) |
| 30 | GTP-rho binding protein 1 | gi\|6680085 | Mouse | 643 | Science 271 (5249), |
| | | | | | 645-648 (1996) |
| 31 | INOSITOL 1,4,5-TRISPHOSPHATE | sp\|P27987\|IP3L | Human | 505 | Biochem. J. 278 (Pt |
| | 3-KINASE (IP3K) | | | | 3), 883-886 (1991) |
| 32 | FH1/FH2 domain-containing | gi\|7019375 | Human | 1164 | Gene 232 (2), 173-182 |
| | protein FHOS | | | | (1999) |
| 33 | SERINE/THREONINE-PROTEIN | sp\|008875\|DCK1 | Rat | 433 | J. Mol. Neurosci. 10 |
| | KINASE DCAMKL1 | | | | (2), 75-98 (1998) |
| 34 | 1 beta dynein heavy chain | emb\|CAB99316.1\| | Chlamydomonas | 4513 | Mol. Biol. Cell 11 |
| | | | | | (7), 2297-2313 (2000) |
| 35 | rsec8 | pir\|\|I59422 | Rat | 975 | Proc. Natl. Acad. Sci. |
| | | | | | U.S.A. 92 (21), |
| | | | | | 9613-9617 (1995) |
| 36 | nuclear dual-specificity | gb\|AAC39675.1\| | Human | 1697 | Nature Genet. 18 (4), |
| | phosphatase | | | | 331-337 (1998) |
| 37 | phosphatidic acid-preferring | gb\|AAC03019.1\| | Bovine | 875 | J. Biol. Chem. 273 |
| | phospholipase A1 | | | | (1998) 5468-5477 |
| 38 | chromobox homolog 8 | gi\|7304947 | Mouse | 362 | Gene 242 (1-2), 31-40 |
| | | | | | (2000) |
| 39 | polymerase I and transcript | gi\|6679567 | Mouse | 392 | EMBO J. 17 (10), |
| | release factor | | | | 2855-2864 (1998) |
| 40 | pyruvate dehydrogenase | gb\|AAC48785.1\| | Bovine | 878 | J. Biol. Chem. 272 |
| | phosphatase regulatory | | | | (50), 31625-31629 |
| | subunit precursor | | | | (1997) |
| 41 | collagen alpha 1(V) chain | pir\|\|CGHU1V | Human | 1838 | J. Biol. Chem. 261 |
| | precursor | | | | (11), 5034-5040 |
| | | | | | (1986) |
| 42 | TUBULIN BETA-5 CHAIN | sp\|P09653\|TBB5_{—} | Gallus | 446 | Mol. Cell. Biol. 6 |
| | (BETA-TUBULIN CLASS-V) | CHICK | | | (12), 4409-4418 |
| | | | | | (1986) |
| 43 | PROTEOGLYCAN LINK PROTEIN | sp\|P07354\|PLK_CHICK | Gallus | 355 | Proc. Natl. Acad. Sci. |
| | PRECURSOR (CARTILAGE LINK | | | | U.S.A. 83 (11), |
| | PROTEIN) | | | | 3766-3770 (1986) |
| 44 | FAT tumor suppressor | gi\|4885229 | Human | 4590 | Genomics 30 (2), |
| | | | | | 207-223 (1995) |
| 45 | N-ACETYLGLUCOSAMINYLTRANSFERASE | sp\|P56558\|OGT1 | Rat | 1036 | J. Biol. Chem. 272 |
| | 110 KDA SUBUNIT | | | | (14), 9308-9315 |
| | | | | | (1997) |
| 46 | OPA-containing protein 1 | gb\|AAC83164.1\| | Mouse | 2074 | Mol. Psych. 3 (4), |
| | | | | | 303-309 (1998) |
| 47 | huntingtin-associated protein | gi\|4504335 | Human | 1663 | Hum. Mol. Genet. 6 |
| | interacting protein | | | | (9), 1519-1525 (1997) |
| 48 | zinc finger protein 91 | gi\|4508041 | Human | 1191 | Proc. Natl. Acad. Sci. |
| | | | | | U.S.A. 88 (9), |
| | | | | | 3608-3612 (1991) |
| 49 | Proline rich synapse | emb\|CAB45688.1\| | Rat | 1806 | Biochem. Biophys. |
| | associated protein 2 | | | | Res. Commun. 264, |
| | | | | | 2476-2528 (1999) |
| 50 | glutamate receptor | gb\|AAD25916.1\|AF072509_1 | Rat | 1043 | Neuron 22, 511-524 |
| | interacting protein 2 | | | | (1999) |
| 51 | SH3-domain binding protein 5 | gi\|4759058 | Human | 425 | Biochem. Biophys. |
| | (BTK-associated) | | | | Res. Commun. 245 (2), |
| | | | | | 337-343 (1998) |
| 52 | ankyrin 3 | gb\|AAB01607.1\| | Mouse | 1961 | J. Cell Biol. 130 |
| | | | | | (2), 313-330 (1995) |
| 53 | CMP-N-ACETYLNEURAMINATE-BETA- | sp\|Q92182\|CAG1_{—} | Gallus | 413 | Eur. J. Biochem. 219 |
| | GALACTOSAMIDE-ALPHA-2, | CHICK | | | (1-2), 375-381 (1994) |
| | 6-SIALYLTRANSFERASE | | | | |
| 54 | dynein heavy chain isotype 6 | pir\|\|T30298 | Globe fish | 1125 | Mol. Biol. Cell 5 (1), |
| | | | | | 57-70 (1994) |
| 55 | ubiquitinating enzyme E2-230 kDa | pir\|\|I49264 | Mouse | 299 | Proc. Natl. Acad. |
| | | | | | Sci. U.S.A. 92 (11), |
| | | | | | 4982-4986 (1995) |
| 56 | KPL2 | gb\|AAD56310.1\|AF102129_1 | Rat | 1744 | Am. J. Respir. Cell |
| | | | | | Mol. Biol. 20 (4), |
| | | | | | 675-683 (1999) |
| 57 | putative microtubule | gb\|AAC79958.1\| | Gallus | 369 | J. Med. Dent. Sci. 45, |
| | associated protein | | | | 123-133 (1998) |
| 58 | pyruvate dehydrogenase | gb\|AAC48785.1\| | Bovine | 878 | J. Biol. Chem. 272 |
| | phosphatase regulatory | | | | (50), 31625-31629 |
| | subunit precursor | | | | (1997) |
| 59 | kinesin light chain | gb\|AAB87735.1\| | Plectonema | 490 | DNA Cell Biol. 16 (6), |
| | | | | | 787-795 (1997) |
| 60 | TFNR | emb\|CAC21448.1\| | Human | 2187 | Genomics 70, 315-326 |
| | | | | | (2000) |
| 61 | ENDOZEPINE-RELATED PROTEIN | sp\|P07106\|ENDR | Bovine | 533 | DNA 6 (1), 71-79 |
| | PRECURSOR | | | | (1987) |
| 62 | cytoplasmic dynein heavy chain 2 | gi\|12711694 | Rat | 4306 | Mol. Biol. Cell 9, 276 |
| | | | | | (1998) |
| 63 | Myosin XV | gi\|6754780 | Mouse | 3511 | Genomics 61 (3), |
| | | | | | 243-258 (1999) |
| 64 | breakpoint cluster region | gb\|AAC08965.1\| | Human | 510 | Genomics 52 (1), 17-26 |
| | protein 2 | | | | (1998) |
| 65 | HrPOPK-1 | dbj\|BAA28663.1\| | Ascidian | 698 | Mech. Dev. 76 (1-2), |
| | | | | | 161-163 (1998) |
| 66 | MEGF6 | gi\|12621134 | Rat | 1574 | Genomics 51 (1), 27-34 |
| | | | | | (1998) |
| 67 | MEGF6 | gi\|12621134 | Rat | 1574 | Genomics 51 (1), 27-34 |
| | | | | | (1998) |
| 68 | p150-Spir protein | emb\|CAB62901.1\| | Fruit fly | 1020 | Curr. Biol. 10 (6), |
| | | | | | 345-348 (2000) |
| 69 | fibrillin 5 | emb\|CAB56757.1\| | Human | 754 | Nature 352 (6333), |
| | | | | | 330-334 (1991) |
| 70 | zinc finger protein | pir\|\|B38203 | Mouse | 191 | Genes Dev. 6 (6), |
| | | | | | 903-918 (1992) |
| ^{※}Nomenclature of each biological species is as follows: mouse = Mus musculus; human = Homo sapiens; bacillus of green pus = Pseudomonas aeruginosa; rat = Rattus norvegicus; volvox = Volvox carteri f. nagariensis; Hawaii's sea urchin = Tripneustes gratilla; rabbit = Oryctolagus cuniculus; fruit fly = Drosophila melanogaster; chlamydomonas = Chlamydomonas reinhardtii; | | | | | |
| # bovine = Bos taurus; gallus = Gallus gallus; globe fish = Takifugu rubripes; plectonema = Plectonema boryanum; ascidian = Halocynthia roretzi. | | | | | |

[0103] Table 3 summarizes a variety of data concerning homology between the DNA or the gene of the present invention contained in each clone and each homologous gene listed in Table 2. The meaning of each item in Table 3 is as follows:
[0104] Score: the higher the value, the higher the reliability
[0105] E-value: the closer this value to 0, the higher the reliability
[0106] Starting point: an amino acid position as a starting point of the homologous region
[0107] End point: an amino acid position as an end point of the homologous region
[0108] Homology: the proportion (degree) of amino acid residues that are identical in a homologous region.

[0109] Homologous region %: the proportion (%) of a homologous region in a homologous gene.

TABLE 3
Homology between each gene and homologous gene

| | Homologous region | | | | | | | | |
|---|---|---|---|---|---|---|---|---|---|
| | | | Homologous | | | | | | |
| SEQ | clone | | gene | | Homology value | | | | |
| ID | Starting | End | Starting | End | | | | | Homologous |
| NO: | point | point | point | point | Score | E-value | Homology | | region % |
| 1 | 20 | 318 | 211 | 472 | 295 | 4e−79 | 50% | (155/310) | 55% |
| 2 | 1 | 183 | 975 | 1166 | 156 | 3e−37 | 42% | (81/192) | 16% |
| 3 | 20 | 187 | 259 | 442 | 122 | 3e−27 | 39% | (74/187) | 42% |
| 4 | 1 | 1324 | 278 | 1601 | 2708 | 0 | 99% | (1321/1324) | 75% |
| 5 | 71 | 217 | 322 | 468 | 266 | 2e−70 | 91% | (135/147) | 27% |
| 6 | 4 | 653 | 294 | 923 | 599 | e−170 | 51% | (343/661) | 60% |
| 7 | 1 | 235 | 303 | 534 | 325 | 3e−88 | 60% | (142/235) | 36% |
| 8 | 51 | 193 | 283 | 425 | 275 | 3e−73 | 93% | (134/143) | 28% |
| 9 | 92 | 373 | 418 | 699 | 591 | e−168 | 100% | (282/282) | 40% |
| 10 | 6 | 215 | 76 | 285 | 303 | 9e−82 | 68% | (143/210) | 74% |
| 11 | 875 | 1130 | 27 | 277 | 144 | 6e−33 | 37% | (96/256) | 61% |
| 12 | 36 | 380 | 28 | 372 | 444 | e−124 | 57% | (199/346) | 79% |
| 13 | 47 | 505 | 619 | 1077 | 928 | 0 | 100% | (459/459) | 43% |
| 14 | 37 | 530 | 1 | 494 | 963 | 0 | 100% | (494/494) | 84% |
| 15 | 165 | 1051 | 1 | 887 | 1794 | 0 | 98% | (874/887) | 100% |
| 16 | 62 | 856 | 1 | 755 | 1499 | 0 | 94% | (753/795) | 94% |
| 17 | 2 | 669 | 1 | 655 | 816 | 0 | 64% | (435/674) | 90% |
| 18 | 2 | 998 | 515 | 1592 | 593 | e−168 | 35% | (398/1127) | 68% |
| 19 | 187 | 748 | 739 | 1328 | 189 | 9e−47 | 30% | (188/625) | 28% |
| 20 | 1 | 480 | 251 | 738 | 1001 | 0 | 97% | (476/488) | 66% |
| 21 | 1 | 718 | 457 | 1173 | 1364 | 0 | 94% | (683/719) | 60% |
| 22 | 1020 | 1094 | 1 | 75 | 152 | 1e−35 | 98% | (74/75) | 100% |
| 23 | 26 | 388 | 97 | 459 | 738 | 0 | 99% | (360/363) | 72% |
| 24 | 6 | 413 | 7 | 417 | 306 | 3e−82 | 39% | (163/411) | 91% |
| 25 | 1063 | 1644 | 383 | 975 | 452 | e−125 | 44% | (273/611) | 58% |
| 26 | 140 | 913 | 332 | 1089 | 835 | 0 | 61% | (491/793) | 66% |
| 27 | 54 | 878 | 20 | 809 | 965 | 0 | 60% | (498/830) | 98% |
| 28 | 1 | 278 | 408 | 684 | 136 | 3e−31 | 32% | (91/284) | 19% |
| 29 | 1 | 705 | 597 | 1329 | 663 | 0 | 46% | (343/736) | 55% |
| 30 | 94 | 259 | 160 | 325 | 267 | 1e−70 | 80% | (133/166) | 26% |
| 31 | 319 | 519 | 3 | 203 | 419 | e−116 | 100% | (201/201) | 40% |
| 32 | 2 | 361 | 216 | 569 | 182 | 2e−44 | 37% | (142/379) | 30% |
| 33 | 308 | 445 | 75 | 212 | 152 | 7e−36 | 51% | (71/138) | 32% |
| 34 | 1 | 1353 | 3205 | 4512 | 966 | 0 | 37% | (515/1363) | 29% |
| 35 | 1 | 966 | 9 | 975 | 1816 | 0 | 95% | (921/967) | 99% |
| 36 | 110 | 1762 | 5 | 1630 | 1828 | 0 | 57% | (957/1674) | 96% |
| 37 | 4 | 498 | 381 | 875 | 979 | 0 | 95% | (475/495) | 57% |
| 38 | 1 | 389 | 1 | 362 | 667 | 0 | 87% | (341/389) | 100% |
| 39 | 1 | 380 | 11 | 392 | 682 | 0 | 92% | (355/382) | 97% |
| 40 | 1 | 360 | 519 | 878 | 715 | 0 | 93% | (336/360) | 41% |
| 41 | 2 | 592 | 634 | 1274 | 545 | e−154 | 46% | (304/647) | 35% |
| 42 | 14 | 369 | 90 | 445 | 720 | 0 | 97% | (346/356) | 80% |
| 43 | 36 | 376 | 19 | 353 | 361 | 7e−99 | 49% | (171/345) | 94% |
| 44 | 3 | 615 | 2979 | 3576 | 255 | 1e−66 | 30% | (189/618) | 13% |
| 45 | 1 | 1036 | 1 | 1036 | 2117 | 0 | 99% | (1030/1036) | 100% |
| 46 | 129 | 263 | 1911 | 2052 | 101 | 7e−21 | 50% | (72/144) | 7% |
| 47 | 53 | 1115 | 588 | 1663 | 2132 | 0 | 98% | (1063/1076) | 65% |
| 48 | 66 | 760 | 425 | 1157 | 744 | 0 | 48% | (365/758) | 62% |
| 49 | 1 | 797 | 1010 | 1806 | 1504 | 0 | 94% | (754/799) | 44% |
| 50 | 4 | 1043 | 11 | 1043 | 1814 | 0 | 87% | (912/1040) | 99% |
| 51 | 80 | 365 | 7 | 269 | 213 | 2e−54 | 41% | (120/287) | 62% |
| 52 | 658 | 1057 | 213 | 611 | 149 | 2e−34 | 30% | (126/413) | 20% |
| 53 | 211 | 524 | 100 | 413 | 371 | e−102 | 54% | (172/315) | 76% |
| 54 | 717 | 1768 | 1 | 1047 | 1570 | 0 | 73% | (774/1060) | 93% |
| 55 | 129 | 368 | 1 | 240 | 497 | e−139 | 98% | (236/240) | 80% |
| 56 | 6 | 735 | 965 | 1715 | 1195 | 0 | 76% | (579/753) | 43% |
| 57 | 1 | 439 | 1 | 369 | 472 | e−132 | 58% | (258/440) | 100% |
| 58 | 1 | 879 | 1 | 878 | 1680 | 0 | 91% | (804/878) | 100% |
| 59 | 264 | 557 | 179 | 446 | 153 | 5e−36 | 36% | (108/294) | 55% |
| 60 | 1 | 742 | 1446 | 2187 | 1463 | 0 | 99% | (741/742) | 34% |
| 61 | 6 | 437 | 93 | 533 | 722 | 0 | 80% | (357/443) | 83% |
| 62 | 1 | 1194 | 3113 | 4306 | 2274 | 0 | 94% | (1126/1194) | 28% |
| 63 | 146 | 965 | 1653 | 2499 | 494 | e−138 | 35% | (319/888) | 24% |
| 64 | 278 | 787 | 1 | 510 | 1048 | 0 | 99% | (508/510) | 100% |
| 65 | 1 | 650 | 44 | 647 | 611 | e−174 | 51% | (346/678) | 87% |
| 66 | 4 | 94 | 330 | 419 | 117 | 5e−26 | 52% | (48/91) | 6% |
| 67 | 74 | 892 | 32 | 1002 | 499 | e−139 | 32% | (315/982) | 62% |
| 68 | 62 | 318 | 213 | 456 | 189 | 6e−47 | 42% | (109/259) | 24% |
| 69 | 1 | 242 | 163 | 405 | 435 | e−121 | 74% | (181/243) | 32% |
| 70 | 798 | 988 | 1 | 191 | 389 | e−106 | 96% | (185/191) | 100% |

(4) Search for Each Domain

[0110] Using as queries the amino acid sequence encoded by DNAs contained in the clones, functional domains were searched with a search tool contained in Pfam 6.0 (Pfam HMM ver. 2.1 Search (HMMPFAM), Sonnhammer, E. L. L., Eddy, S. R., Birney, E., Bateman, A., and Durbin, R. (1998) “Pfam: multiple sequence alignments and HMM-profiles of protein domains” Nucleic Acids Res. 26:320-322).

[0111] Further, transmembrane domains were searched with a prediction program for membrane proteins, the SOSUI system (ver. 1.0/10, March, 1996) (Takatsugu Hirokawa, Seah Chieng and Shigeki Mitaku, SOSUI: Classification and Secondary Structure Prediction System for Membrane Proteins), Bioinformatics (formerly CABIOS) 1998 May; 14(4):378-379).

[0112] Table 4 shows the detected functional domains and transmembrane domains for each clone.

[0113] The meaning of each item in Table 4 is as follows:
[0114] Functional domain: a domain detected by Pfam or SOSUI
[0115] Starting point: an amino acid position as a starting point of a functional domain
[0116] End point: an amino acid position as an end point of a functional domain.
[0117] Score (Pfam only): the higher the value, the higher the reliability
[0118] Exp (Pfam only): the closer the value to 0, the higher the reliability

[0119] Table 5 shows the complete notation of each functional domain.

TABLE 4
Functional domain

| SEQ | Clone | | | | | Homologous gene | | | | |
|---|---|---|---|---|---|---|---|---|---|---|
| ID | Functional | Starting | End | | | Functional | Starting | End | | |
| NO: | domain | point | point | Score | Exp | domain | point | point | Score | Exp |
| 1 | | | | | | WD40 | 72 | 109 | 33.1 | 6.2e−06 |
| | | | | | | WD40 | 122 | 159 | 28.6 | 0.00015 |
| | | | | | | WD40 | 166 | 202 | 21.4 | 0.022 |
| 2 | zf-C2H2 | 45 | 67 | 31.2 | 2.4e−05 | KRAB | 13 | 75 | 159.5 | 5.6e−44 |
| | zf-C2H2 | 73 | 95 | 37.1 | 3.9e−07 | zf-C2H2 | 182 | 200 | −1.9 | 1.3e+02 |
| | zf-C2H2 | 123 | 145 | 23.2 | 0.0063 | zf-C2H2 | 210 | 232 | 21.8 | 0.017 |
| | zf-C2H2 | 151 | 173 | 31.3 | 2.2e−05 | zf-C2H2 | 238 | 260 | 33.1 | 6.3e−06 |
| | zf-C2H2 | 179 | 201 | 27.7 | 0.00026 | zf-C2H2 | 266 | 288 | 34 | 3.4e−06 |
| | zf-C2H2 | 261 | 283 | 31.3 | 2.3e−05 | zf-C2H2 | 294 | 316 | 37.9 | 2.3e−07 |
| | zf-C2H2 | 289 | 311 | 38.4 | 1.6e−07 | zf-C2H2 | 322 | 344 | 37.9 | 2.2e−07 |
| | | | | | | zf-C2H2 | 350 | 372 | 36.1 | 7.8e−07 |
| | | | | | | zf-C2H2 | 378 | 400 | 34.9 | 1.8e−06 |
| | | | | | | zf-C2H2 | 406 | 428 | 35.3 | 1.4e−06 |
| | | | | | | zf-C2H2 | 434 | 456 | 35.3 | 1.4e−06 |
| | | | | | | zf-C2H2 | 462 | 484 | 33.8 | 3.9e−06 |
| | | | | | | zf-C2H2 | 490 | 512 | 37.1 | 4e−07 |
| | | | | | | zf-C2H2 | 518 | 540 | 15.7 | 1.1 |
| | | | | | | zf-C2H2 | 546 | 568 | 32.4 | 1.1e−05 |
| | | | | | | zf-C2H2 | 574 | 596 | 34 | 3.4e−06 |
| | | | | | | zf-C2H2 | 602 | 624 | 34.2 | 3.1e−06 |
| | | | | | | zf-C2H2 | 630 | 652 | 37.9 | 2.2e−07 |
| | | | | | | zf-C2H2 | 658 | 680 | 36.1 | 7.8e−07 |
| | | | | | | zf-C2H2 | 686 | 708 | 34.9 | 1.8e−06 |
| | | | | | | zf-C2H2 | 714 | 736 | 35.3 | 1.4e−06 |
| | | | | | | zf-C2H2 | 742 | 764 | 36.8 | 5e−07 |
| | | | | | | zf-C2H2 | 770 | 792 | 35 | 1.7e−06 |
| | | | | | | zf-C2H2 | 798 | 820 | 37.3 | 3.4e−07 |
| | | | | | | zf-C2H2 | 826 | 848 | 34.8 | 2e−06 |
| | | | | | | zf-C2H2 | 854 | 876 | 37 | 4.2e−07 |
| | | | | | | zf-C2H2 | 885 | 904 | 11.3 | 6.3 |
| | | | | | | zf-C2H2 | 910 | 932 | 38.2 | 1.9e−07 |
| | | | | | | zf-C2H2 | 938 | 960 | 36.5 | 5.9e−07 |
| | | | | | | zf-C2H2 | 966 | 988 | 34.3 | 2.8e−06 |
| | | | | | | zf-C2H2 | 994 | 1016 | 39 | 1.1e−07 |
| | | | | | | zf-C2H2 | 1022 | 1044 | 35.1 | 1.6e−06 |
| | | | | | | zf-C2H2 | 1050 | 1072 | 33.8 | 3.8e−06 |
| | | | | | | zf-C2H2 | 1078 | 1100 | 39 | 1.1e−07 |
| | | | | | | zf-C2H2 | 1106 | 1128 | 32.9 | 7.5e−06 |
| | | | | | | zf-C2H2 | 1134 | 1156 | 19.5 | 0.081 |
| 3 | ig | 21 | 87 | 16.9 | 0.0012 | sosui | 16 | 38 | — | — |
| | sosui | 120 | 142 | — | — | ig | 57 | 126 | 23.3 | 1.1e−05 |
| | | | | | | ig | 159 | 222 | 9.6 | 0.21 |
| | | | | | | ig | 260 | 315 | 36.6 | 8.6e−10 |
| | | | | | | sosui | 374 | 396 | — | — |
| 4 | Sema | 14 | 196 | 78.3 | 2.9e−20 | Sema | 29 | 473 | 198.8 | 8.3e−56 |
| | Plexin_repeat | 215 | 265 | 58.1 | 1.9e−13 | Plexin_repeat | 492 | 542 | 58.1 | 1.9e−13 |
| | integrin_B | 221 | 237 | 5.1 | 0.18 | integrin_B | 498 | 514 | 5.1 | 0.18 |
| | Plexin_repeat | 361 | 408 | 59.8 | 5.7e−14 | Plexin_repeat | 638 | 685 | 59.8 | 5.7e−14 |
| | Plexin_repeat | 509 | 563 | 50.7 | 3.3e−11 | Plexin_repeat | 786 | 840 | 50.7 | 3.3e−11 |
| | integrin_B | 516 | 535 | 9.4 | 0.006 | integrin_B | 793 | 812 | 9.4 | 0.006 |
| | TIG | 565 | 660 | 75.5 | 1.1e−18 | TIG | 842 | 937 | 75.5 | 1.1e−18 |
| | TIG | 662 | 746 | 86.3 | 6.3e−22 | TIG | 939 | 1023 | 86.3 | 6.3e−22 |
| | TIG | 749 | 848 | 71.3 | 2e−17 | TIG | 1026 | 1125 | 71.3 | 2e−17 |
| | TIG | 851 | 937 | 42.9 | 7.2e−09 | TIG | 1128 | 1214 | 42.9 | 7.2e−09 |
| | sosui | 943 | 965 | — | — | | | | | |
| 5 | PH | 83 | 194 | 43.6 | 7.7e−11 | RhoGEF | 121 | 297 | 71.2 | 2.2e−17 |
| | | | | | | PH | 334 | 445 | 42.8 | 1.3e−10 |
| | | | | | | SH3 | 459 | 515 | 47.3 | 3.3e−10 |
| 6 | zf-C2H2 | 449 | 471 | 37.3 | 3.4e−07 | zf-C2H2 | 21 | 44 | 26.3 | 0.00074 |
| | zf-BED | 462 | 501 | 11.3 | 0.073 | zf-C2H2 | 75 | 97 | 26.5 | 0.00061 |
| | zf-C2H2 | 477 | 500 | 33.5 | 4.8e−06 | zf-C2H2 | 103 | 125 | 35.1 | 1.6e−06 |
| | zf-C2H2 | 506 | 528 | 26.5 | 0.00061 | zf-BED | 116 | 155 | −0.3 | 1.5 |
| | | | | | | zf-C2H2 | 131 | 154 | 37.2 | 3.8e−07 |
| | | | | | | zf-C2H2 | 160 | 182 | 32 | 1.4e−05 |
| | | | | | | zf-C2H2 | 188 | 210 | 26.5 | 0.00064 |
| | | | | | | zf-C2H2 | 217 | 239 | 29.5 | 7.8e−05 |
| | | | | | | zf-C2H2 | 724 | 746 | 37.3 | 3.4e−07 |
| | | | | | | zf-BED | 737 | 776 | 11.3 | 0.073 |
| | | | | | | zf-C2H2 | 752 | 775 | 33.5 | 4.8e−06 |
| | | | | | | zf-C2H2 | 781 | 803 | 27.5 | 0.0003 |
| 7 | | | | | | AMP-binding | 108 | 544 | 446.8 | 1.8e−130 |
| 8 | | | | | | Pro_dh | 143 | 498 | 582.7 | 2.4e−171 |
| 9 | Glyco_hydro_47 | 2 | 369 | 205 | 1.2e−57 | sosui | 83 | 105 | — | — |
| | sosui | 17 | 39 | — | — | Glyco_hydro_47 | 256 | 695 | 696 | 1.9e−205 |
| 10 | C2 | 76 | 163 | 45.6 | 1.1e−09 | C2 | 146 | 233 | 61.9 | 1.4e−14 |
| 12 | BNR | 44 | 55 | 9.4 | 34 | sosui | 1 | 23 | — | — |
| | laminin_Nterm | 58 | 304 | 30 | 5.4e−12 | laminin_Nterm | 50 | 295 | 37.3 | 1.6e−12 |
| | BNR | 171 | 182 | 11.7 | 16 | laminin_EGF | 297 | 341 | 33.3 | 5.4e−06 |
| | laminin_EGF | 306 | 363 | 35.2 | 1.5e−06 | sosui | 419 | 438 | — | — |
| 13 | RasGEFN | 114 | 170 | 36.7 | 5.3e−07 | RasGEFN | 686 | 742 | 36.7 | 5.3e−07 |
| | RasGEF | 265 | 442 | 206.6 | 3.8e−58 | RasGEF | 837 | 1014 | 206.6 | 3.8e−58 |
| 15 | Armadillo_seg | 281 | 319 | 13.4 | 2.6 | Armadillo_seg | 117 | 155 | 13.4 | 2.6 |
| | Armadillo_seg | 364 | 406 | 0.4 | 84 | Armadillo_seg | 200 | 242 | 0.4 | 84 |
| | HEAT | 373 | 408 | 10.9 | 9 | HEAT | 209 | 244 | 10.9 | 9 |
| | HEAT | 551 | 589 | 10.3 | 11 | HEAT | 387 | 425 | 10.3 | 11 |
| | Armadillo_seg | 590 | 628 | 19.8 | 0.064 | Armadillo_seg | 426 | 464 | 19.8 | 0.064 |
| | HEAT | 592 | 630 | 1.4 | 1.1e+02 | HEAT | 428 | 466 | 1.4 | 1.1e+02 |
| | HEAT | 718 | 758 | 1.7 | 1e+02 | HEAT | 554 | 594 | 1.7 | 1e+02 |
| | Armadillo_seg | 819 | 857 | 1.2 | 68 | HEAT | 657 | 695 | 11.7 | 7.3 |
| | HEAT | 821 | 859 | 11.6 | 7.6 | Armadillo_seg | 695 | 734 | 17.3 | 0.37 |
| | Armadillo_seg | 859 | 898 | 11.4 | 4.5 | | | | | |
| 17 | pkinase | 60 | 311 | 351.3 | 1.1e−101 | pkinase | 56 | 307 | 345.6 | 5.3e−100 |
| | UBA | 331 | 370 | 30.8 | 3.1e−05 | UBA | 327 | 366 | 31.1 | 2.6e−05 |
| 18 | ank | 50 | 83 | 6.3 | 36 | ank | 563 | 594 | 4.6 | 58 |
| | ank | 84 | 116 | 42.3 | 1.1e−08 | ank | 627 | 659 | 18.1 | 0.2 |
| | ank | 117 | 149 | 39.4 | 8.3e−08 | ank | 660 | 692 | 42.8 | 7.6e−09 |
| | ank | 150 | 182 | 40.1 | 5e−08 | ank | 693 | 725 | 39.8 | 6e−08 |
| | ank | 183 | 217 | 18.5 | 0.16 | ank | 726 | 760 | 25.9 | 0.00094 |
| | ank | 253 | 286 | 23.4 | 0.0053 | | | | | |
| 19 | | | | | | Pkinase | 221 | 479 | 215.7 | 7e−61 |
| 21 | Troponin | 230 | 378 | −18.4 | 0.97 | Troponin | 685 | 833 | −17.8 | 0.87 |
| 22 | WW | 37 | 67 | 4.5 | 2.3 | Sosui | 1 | 23 | — | — |
| | WW | 76 | 106 | 23.4 | 0.0054 | | | | | |
| | MyTH4 | 772 | 890 | 78.5 | 1.4e−19 | | | | | |
| | RhoGAP | 920 | 1067 | 76.1 | 7.3e−19 | | | | | |
| 23 | A_deamin | 27 | 76 | 17.7 | 0.0003 | A_deamin | 63 | 147 | 86.3 | 3.9e−24 |
| | A_deamin | 220 | 295 | 76.3 | 3.2e−21 | A_deamin | 431 | 497 | 16.1 | 0.00084 |
| 24 | sosui | 1 | 19 | — | — | sosui | 46 | 68 | — | — |
| | sosui | 43 | 65 | — | — | sosui | 87 | 108 | — | — |
| | sosui | 83 | 104 | — | — | sosui | 214 | 236 | — | — |
| | sosui | 175 | 197 | — | — | sosui | 247 | 269 | — | — |
| | sosui | 209 | 231 | — | — | sosui | 390 | 412 | — | — |
| | sosui | 240 | 262 | — | — | | | | | |
| | sosui | 388 | 410 | — | — | | | | | |
| 25 | PH | 1067 | 1175 | 77.3 | 2.6e−20 | PH | 44 | 145 | 49.8 | 1.4e−12 |
| | | | | | | PH | 387 | 482 | 75.2 | 9.6e−20 |
| 26 | tubulin-binding | 747 | 777 | 54.8 | 1.1e−14 | tubulin-binding | 923 | 953 | 54.8 | 1.1e−14 |
| | tubulin-binding | 816 | 846 | 61.8 | 9.4e−17 | tubulin-binding | 992 | 1022 | 61.8 | 9.4e−17 |
| | tubulin-binding | 847 | 877 | 61 | 1.6e−16 | tubulin-binding | 1023 | 1053 | 61 | 1.6e−16 |
| | tubulin-binding | 878 | 909 | 36.5 | 3.2e−09 | tubulin-binding | 1054 | 1085 | 36.5 | 3.2e−09 |
| 27 | PH | 145 | 236 | 78.7 | 1e−20 | PH | 91 | 183 | 87.8 | 2.8e−23 |
| | Oxysterol_BP | 446 | 868 | 506.2 | 2.4e−148 | Oxysterol_BP | 383 | 799 | 770.3 | 7.5e−228 |
| 28 | Kelch | 32 | 79 | 30 | 5.5e−05 | BTB | 141 | 253 | 127.6 | 2.3e−34 |
| | Kelch | 81 | 126 | 43.2 | 6e−09 | Kelch | 392 | 436 | 20.4 | 0.042 |
| | Kelch | 128 | 176 | 30.1 | 5.1e−05 | Kelch | 438 | 483 | 44.6 | 2.3e−09 |
| | Kelch | 178 | 218 | 42.8 | 7.5e−09 | Kelch | 485 | 530 | 52.7 | 8.3e−12 |
| | Kelch | 220 | 267 | 48.3 | 1.7e−10 | Kelch | 532 | 579 | 49.9 | 5.5e−11 |
| | | | | | | Kelch | 581 | 626 | 49 | 1.1e−10 |
| | | | | | | Kelch | 628 | 673 | 48.9 | 1.1e−10 |
| 29 | laminin_G | 220 | 342 | 76.1 | 1.6e−20 | sosui | 7 | 29 | — | — |
| | EGF | 361 | 395 | 19.3 | 0.089 | F5_F8_type_C | 38 | 178 | 216.5 | 4e−61 |
| | TSPN | 380 | 577 | −42.4 | 0.71 | laminin_G | 216 | 348 | 62.2 | 1.5e−16 |
| | laminin_G | 472 | 530 | 8.4 | 0.37 | laminin_G | 401 | 532 | 48.5 | 1.3e−12 |
| | sosui | 639 | 661 | — | — | EGF | 558 | 590 | 30.3 | 4.4e−05 |
| | | | | | | laminin_G | 827 | 948 | 53.8 | 3.8e−14 |
| | | | | | | EGF | 967 | 1001 | 18.2 | 0.19 |
| | | | | | | Laminin_G | 1055 | 1185 | 15.6 | 0.0032 |
| 30 | BR01 | 66 | 201 | 123.2 | 4.7e−33 | HR1 | 42 | 114 | 89.2 | 8.4e−23 |
| | | | | | | BR01 | 115 | 267 | 276.1 | 4.6e−79 |
| | | | | | | PDZ | 500 | 577 | 45 | 1.6e−09 |
| 32 | FH2 | 661 | 1157 | 178.1 | 1.5e−49 | FH2 | 594 | 1069 | 187.1 | 2.7e−52 |
| 33 | pkinase | 316 | 445 | 170.2 | 3.4e−47 | pkinase | 83 | 340 | 326.3 | 3.5e−94 |
| 34 | Dynein_heavy | 597 | 1351 | 920 | 6.8e−273 | Dynein_heavy | 3804 | 4510 | 910.4 | 5.1e−270 |
| 36 | DENN | 44 | 183 | 111.1 | 7e−30 | DENN | 5 | 78 | 70 | 2.2e−18 |
| | GRAM | 756 | 842 | 46.6 | 3.8e−12 | GRAM | 650 | 736 | 62.4 | 9.1e−17 |
| | PH | 1661 | 1764 | 68 | 1e−17 | PH | 1529 | 1632 | 63.6 | 1.8e−16 |
| 37 | DDHD | 237 | 484 | 401.4 | 8.6e−117 | DDHD | 614 | 861 | 431.3 | 8.9e−126 |
| 38 | chromo | 8 | 48 | 67.7 | 2.1e−18 | chromo | 8 | 48 | 67.7 | 2.1e−18 |
| 40 | GCV_T | 4 | 344 | 556.6 | 1.6e−163 | DAO | 42 | 403 | −70.5 | 0.0014 |
| | | | | | | Phytoene_dh | 44 | 405 | −327.7 | 0.14 |
| | | | | | | UPF0079 | 52 | 149 | −47.5 | 0.26 |
| | | | | | | GCV_T | 522 | 862 | 593.6 | 1.2e−174 |
| 41 | Collagen | 5 | 64 | 46.8 | 4.9e−10 | TSPN | 39 | 230 | 289.8 | 3.3e−83 |
| | Collagen | 65 | 124 | 50.1 | 5.1e−11 | Collagen | 469 | 528 | 23.8 | 0.00018 |
| | Collagen | 125 | 184 | 52.1 | 1.2e−11 | Collagen | 554 | 612 | 27.7 | 0.00011 |
| | Collagen | 188 | 247 | 48.8 | 1.2e−10 | Collagen | 613 | 672 | 61.8 | 1.5e−14 |
| | Collagen | 251 | 310 | 53.8 | 3.7e−12 | Collagen | 673 | 732 | 60.8 | 3e−14 |
| | Collagen | 312 | 371 | 58.4 | 1.5e−13 | Collagen | 733 | 792 | 42.8 | 7.5e−09 |
| | Collagen | 384 | 443 | 48.5 | 1.5e−10 | Collagen | 793 | 852 | 37.7 | 2.7e−07 |
| | Collagen | 450 | 509 | 50.8 | 3e−11 | Collagen | 853 | 912 | 43.9 | 3.6e−09 |
| | Collagen | 534 | 593 | 44.8 | 1.9e−09 | Collagen | 913 | 972 | 59.9 | 5.4e−14 |
| | COLFI | 648 | 706 | 92.7 | 1e−35 | Collagen | 985 | 1044 | 54.4 | 2.5e−12 |
| | COLFI | 715 | 831 | 56.7 | 1.1e−21 | Collagen | 1045 | 1104 | 55.2 | 1.5e−12 |
| | | | | | | Collagen | 1105 | 1164 | 55.7 | 9.9e−13 |
| | | | | | | Collagen | 1165 | 1224 | 49.5 | 7.2e−11 |
| | | | | | | Collagen | 1225 | 1284 | 46.7 | 5.3e−10 |
| | | | | | | Collagen | 1285 | 1344 | 48.9 | 1.1e−10 |
| | | | | | | Collagen | 1345 | 1404 | 43.5 | 4.7e−09 |
| | | | | | | Collagen | 1405 | 1464 | 46.4 | 6.3e−10 |
| | | | | | | Collagen | 1465 | 1524 | 55.9 | 9.1e−13 |
| | | | | | | Collagen | 1525 | 1584 | 18.9 | 0.00032 |
| | | | | | | COLFI | 1625 | 1836 | 484.1 | 1.1e−188 |
| 42 | tubulin | 14 | 347 | 737 | 8e−218 | | | | | |
| 43 | sosui | 16 | 36 | — | — | ig | 54 | 142 | 25.8 | 2e−06 |
| | ig | 71 | 155 | 23.8 | 8e−06 | Xlink | 159 | 254 | 220.3 | 7.1e−95 |
| | Xlink | 172 | 277 | 162 | 1.2e−69 | Xlink | 260 | 351 | 196 | 2.3e−84 |
| | Xlink | 283 | 374 | 132 | 1.3e−56 | | | | | |
| 44 | cadherin | 56 | 143 | 86.5 | 5.3e−22 | sosui | 4 | 26 | — | — |
| | cadherin | 157 | 253 | 81.7 | 1.5e−20 | cadherin | 39 | 140 | 14.8 | 0.04 |
| | cadherin | 267 | 360 | 69.7 | 6.2e−17 | cadherin | 154 | 248 | 70.4 | 3.8e−17 |
| | cadherin | 374 | 470 | 50.8 | 3.1e−11 | cadherin | 372 | 454 | 20.6 | 0.013 |
| | cadherin | 486 | 577 | 94.6 | 1.9e−24 | cadherin | 468 | 560 | 69.2 | 8.8e−17 |
| | cadherin | 591 | 682 | 72.4 | 9.5e−18 | cadherin | 574 | 664 | 24.7 | 0.0022 |
| | | | | | | cadherin | 722 | 813 | 68.8 | 1.1e−16 |
| | | | | | | cadherin | 827 | 918 | 98.3 | 1.5e−25 |
| | | | | | | cadherin | 932 | 1023 | 96.9 | 3.9e−25 |
| | | | | | | cadherin | 1039 | 1130 | 83.9 | 3.3e−21 |
| | | | | | | cadherin | 1144 | 1236 | 105.7 | 8.8e−28 |
| | | | | | | cadherin | 1250 | 1346 | 41 | 2.7e−08 |
| | | | | | | cadherin | 1363 | 1447 | 46.3 | 6.6e−10 |
| | | | | | | cadherin | 1461 | 1553 | 53.5 | 4.7e−12 |
| | | | | | | cadherin | 1567 | 1661 | 89.5 | 6.6e−23 |
| | | | | | | cadherin | 1675 | 1759 | 69.7 | 6e−17 |
| | | | | | | cadherin | 1773 | 1871 | 47.7 | 2.7e−10 |
| | | | | | | cadherin | 1887 | 1973 | 36.7 | 5.4e−07 |
| | | | | | | cadherin | 1987 | 2073 | 29.5 | 7.9e−05 |
| | | | | | | cadherin | 2089 | 2178 | 43.9 | 3.6e−09 |
| | | | | | | cadherin | 2190 | 2277 | 53.8 | 3.9e−12 |
| | | | | | | cadherin | 2291 | 2384 | 96.1 | 7e−25 |
| | | | | | | cadherin | 2398 | 2486 | 44.1 | 3.1e−09 |
| | | | | | | cadherin | 2500 | 2590 | 48.6 | 1.4e−10 |
| | | | | | | cadherin | 2604 | 2696 | 47.1 | 3.9e−10 |
| | | | | | | cadherin | 2710 | 2802 | 35.4 | 1.3e−06 |
| | | | | | | cadherin | 2816 | 2911 | 81.5 | 1.8e−20 |
| | | | | | | cadherin | 2925 | 3016 | 68.3 | 1.7e−16 |
| | | | | | | cadherin | 3030 | 3118 | 94.1 | 2.8e−24 |
| | | | | | | cadherin | 3132 | 3223 | 99.9 | 5e−26 |
| | | | | | | cadherin | 3237 | 3328 | 104.8 | 1.7e−27 |
| | | | | | | cadherin | 3342 | 3433 | 106.6 | 4.8e−28 |
| | | | | | | cadherin | 3447 | 3538 | 47.2 | 3.7e−10 |
| | | | | | | cadherin | 3553 | 3634 | 11.5 | 0.077 |
| | | | | | | EGF | 3796 | 3828 | 19.5 | 0.077 |
| | | | | | | laminin_G | 3861 | 3990 | 75.5 | 2.3e−20 |
| | | | | | | EGF | 4019 | 4051 | 36.8 | 4.9e−07 |
| | | | | | | EGF | 4058 | 4089 | 31.7 | 1.7e−05 |
| | | | | | | EGF | 4095 | 4126 | 35.6 | 1.1e−06 |
| | | | | | | EGF | 4133 | 4164 | 32.9 | 7.2e−06 |
| 45 | TPR | 11 | 44 | 1.6 | 31 | TPR | 11 | 44 | 1.6 | 31 |
| | TPR | 79 | 112 | 50.7 | 3.3e−11 | TPR | 79 | 112 | 50.7 | 3.3e−11 |
| | TPR | 113 | 146 | 26.3 | 0.00073 | TPR | 113 | 146 | 26.3 | 0.00073 |
| | TPR | 147 | 180 | 31 | 2.8e−05 | TPR | 147 | 180 | 31 | 2.8e−05 |
| | TPR | 181 | 214 | 39.8 | 6.1e−08 | TPR | 181 | 214 | 39.8 | 6.1e−08 |
| | TPR | 215 | 248 | 31.9 | 1.5e−05 | TPR | 215 | 248 | 31.9 | 1.5e−05 |
| | TPR | 249 | 282 | 38.8 | 1.3e−07 | TPR | 249 | 282 | 38.8 | 1.3e−07 |
| | TPR | 283 | 316 | 39.5 | 7.4e−08 | TPR | 283 | 316 | 39.5 | 7.4e−08 |
| | TPR | 317 | 350 | 40.1 | 5e−08 | TPR | 317 | 350 | 40.1 | 5e−08 |
| | TPR | 351 | 384 | 39.7 | 6.4e−08 | TPR | 351 | 384 | 39.7 | 6.4e−08 |
| | TPR | 385 | 418 | 41.4 | 2e−08 | TPR | 385 | 418 | 41.4 | 2e−08 |
| | TPR | 419 | 452 | 38.2 | 1.9e−07 | TPR | 419 | 452 | 38.2 | 1.9e−07 |
| 46 | | | | | | sosui | 179 | 200 | — | — |
| | | | | | | sosui | 266 | 288 | — | — |
| 47 | RhoGEF | 737 | 907 | 120.3 | 3.6e−32 | spectrin | 188 | 235 | 12 | 0.074 |
| | PH | 921 | 1032 | 45.6 | 2.1e−11 | spectrin | 279 | 308 | 9.6 | 0.34 |
| | | | | | | spectrin | 310 | 416 | 23.7 | 4.2e−05 |
| | | | | | | spectrin | 536 | 642 | 20.1 | 0.00043 |
| | | | | | | spectrin | 803 | 877 | −9.2 | 3.5e+04 |
| | | | | | | spectrin | 890 | 937 | 7 | 1.8 |
| | | | | | | spectrin | 958 | 1004 | 7.8 | 1.1 |
| | | | | | | spectrin | 1130 | 1222 | 17.6 | 0.0021 |
| | | | | | | RhoGEF | 1285 | 1455 | 120.3 | 3.6e−32 |
| | | | | | | PH | 1469 | 1580 | 45.6 | 2.1e−11 |
| 48 | zf-C2H2 | 103 | 125 | 38.1 | 1.9e−07 | KRAB | 13 | 75 | 159.5 | 5.6e−44 |
| | zf-C2H2 | 131 | 153 | 31.8 | 1.6e−05 | zf-C2H2 | 182 | 200 | −1.9 | 1.3e+02 |
| | zf-C2H2 | 159 | 181 | 34.5 | 2.4e−06 | zf-C2H2 | 210 | 232 | 21.8 | 0.017 |
| | zf-C2H2 | 187 | 209 | 35.5 | 1.2e−06 | zf-C2H2 | 238 | 260 | 33.1 | 6.3e−06 |
| | zf-C2H2 | 215 | 237 | 30.8 | 3.2e−05 | zf-C2H2 | 266 | 288 | 34 | 3.4e−06 |
| | zf-C2H2 | 243 | 265 | 30.1 | 5.2e−05 | zf-C2H2 | 294 | 316 | 37.9 | 2.3e−07 |
| | zf-C2H2 | 271 | 293 | 28.6 | 0.00015 | zf-C2H2 | 322 | 344 | 37.9 | 2.2e−07 |
| | zf-C2H2 | 299 | 321 | 29.6 | 7.4e−05 | zf-C2H2 | 350 | 372 | 36.1 | 7.8e−07 |
| | zf-C2H2 | 352 | 374 | 20.2 | 0.051 | zf-C2H2 | 378 | 400 | 34.9 | 1.8e−06 |
| | zf-C2H2 | 380 | 402 | 37.2 | 3.7e−07 | zf-C2H2 | 406 | 428 | 35.3 | 1.4e−06 |
| | zf-BED | 393 | 431 | 5.6 | 0.32 | zf-C2H2 | 434 | 456 | 35.3 | 1.4e−06 |
| | zf-C2H2 | 408 | 430 | 30.2 | 4.7e−05 | zf-C2H2 | 462 | 484 | 33.8 | 3.9e−06 |
| | zf-C2H2 | 436 | 458 | 38.1 | 2e−07 | zf-C2H2 | 490 | 512 | 37.1 | 4e−07 |
| | zf-C2H2 | 464 | 486 | 37.6 | 2.9e−07 | zf-C2H2 | 518 | 540 | 15.7 | 1.1 |
| | zf-C2H2 | 492 | 514 | 25.4 | 0.0013 | zf-C2H2 | 546 | 568 | 32.4 | 1.1e−05 |
| | zf-C2H2 | 544 | 566 | 22.8 | 0.0079 | zf-C2H2 | 574 | 596 | 34 | 3.4e−06 |
| | zf-C2H2 | 572 | 594 | 37.2 | 3.7e−07 | zf-C2H2 | 602 | 624 | 34.2 | 3.1e−06 |
| | zf-BED | 585 | 623 | 3.9 | 0.5 | zf-C2H2 | 630 | 652 | 37.9 | 2.2e−07 |
| | zf-C2H2 | 600 | 622 | 34.9 | 1.9e−06 | zf-C2H2 | 658 | 680 | 36.1 | 7.8e−07 |
| | zf-C2H2 | 628 | 650 | 38.2 | 1.9e−07 | zf-C2H2 | 686 | 708 | 34.9 | 1.8e−06 |
| | zf-C2H2 | 656 | 678 | 32.6 | 9.3e−06 | zf-C2H2 | 714 | 736 | 35.3 | 1.4e−06 |
| | zf-C2H2 | 684 | 706 | 24.4 | 0.0026 | zf-C2H2 | 742 | 764 | 36.8 | 5e−07 |
| | zf-C2H2 | 737 | 759 | 20.9 | 0.03 | zf-C2H2 | 770 | 792 | 35 | 1.7e−06 |
| | | | | | | zf-C2H2 | 798 | 820 | 37.3 | 3.4e−07 |
| | | | | | | zf-C2H2 | 826 | 848 | 34.8 | 2e−06 |
| | | | | | | zf-C2H2 | 854 | 876 | 37 | 4.2e−07 |
| | | | | | | zf-C2H2 | 885 | 904 | 11.3 | 6.3 |
| | | | | | | zf-C2H2 | 910 | 932 | 38.2 | 1.9e−07 |
| | | | | | | zf-C2H2 | 938 | 960 | 36.5 | 5.9e−07 |
| | | | | | | zf-C2H2 | 966 | 988 | 34.3 | 2.8e−06 |
| | | | | | | zf-C2H2 | 994 | 1016 | 39 | 1.1e−07 |
| | | | | | | zf-C2H2 | 1022 | 1044 | 35.1 | 1.6e−06 |
| | | | | | | zf-C2H2 | 1050 | 1072 | 33.8 | 3.8e−06 |
| | | | | | | zf-C2H2 | 1078 | 1100 | 39 | 1.1e−07 |
| | | | | | | zf-C2H2 | 1106 | 1128 | 32.9 | 7.5e−06 |
| | | | | | | zf-C2H2 | 1134 | 1156 | 19.5 | 0.081 |
| 49 | SAM | 732 | 795 | 79.8 | 5.7e−20 | ank | 223 | 256 | 12.3 | 6.6 |
| | | | | | | ank | 257 | 289 | 28 | 0.00022 |
| | | | | | | ank | 290 | 323 | 12.6 | 6 |
| | | | | | | ank | 324 | 356 | 21.5 | 0.021 |
| | | | | | | ank | 357 | 389 | 37.1 | 4.1e−07 |
| | | | | | | SH3 | 548 | 602 | 36.5 | 6.2e−07 |
| | | | | | | PDZ | 645 | 738 | 22.2 | 0.007 |
| | | | | | | SAM | 1741 | 1804 | 80.5 | 3.5e−20 |
| 50 | PDZ | 48 | 130 | 51.2 | 2.3e−11 | PDZ | 53 | 135 | 48.8 | 1.2e−10 |
| | PDZ | 148 | 233 | 54.1 | 3e−12 | PDZ | 153 | 238 | 53.5 | 4.7e−12 |
| | PDZ | 248 | 331 | 42.3 | 1.1e−08 | PDZ | 253 | 336 | 46.7 | 5.3e−10 |
| | PDZ | 456 | 544 | 42.5 | 9.2e−09 | PDZ | 458 | 546 | 39 | 1.1e−07 |
| | PDZ | 557 | 640 | 62 | 1.3e−14 | PDZ | 559 | 642 | 55.7 | 1e−12 |
| | PDZ | 656 | 737 | 69.4 | 7.5e−17 | PDZ | 658 | 739 | 65.6 | 1e−15 |
| | PDZ | 941 | 1022 | 36.4 | 6.5e−07 | PDZ | 942 | 1023 | 26.6 | 0.0006 |
| 52 | ank | 679 | 714 | 6.6 | 33 | ank | 23 | 55 | 3.5 | 80 |
| | ank | 717 | 749 | 6.1 | 38 | ank | 56 | 88 | 43.2 | 5.7e−09 |
| | ank | 750 | 782 | 33.2 | 6.2e−06 | ank | 89 | 121 | 45.3 | 1.4e−09 |
| | ank | 783 | 815 | 4.8 | 55 | ank | 122 | 154 | 42.7 | 8.4e−09 |
| | ank | 823 | 859 | 4.1 | 67 | ank | 155 | 183 | 14.3 | 2.9 |
| | ank | 861 | 893 | 31.5 | 1.9e−05 | ank | 184 | 216 | 18.6 | 0.15 |
| | ank | 894 | 926 | 40 | 5.4e−08 | ank | 217 | 249 | 36.1 | 8e−07 |
| | ank | 927 | 959 | 42.3 | 1.1e−08 | ank | 250 | 282 | 45.6 | 1.1e−09 |
| | ank | 960 | 992 | 35.7 | 1.1e−06 | ank | 283 | 315 | 39.3 | 8.4e−08 |
| | ank | 993 | 1025 | 38.1 | 2e−07 | ank | 316 | 348 | 39.3 | 8.8e−08 |
| | ank | 1026 | 1058 | 12.9 | 5.5 | ank | 349 | 381 | 39.1 | 9.7e−08 |
| | TPR | 1072 | 1105 | 0.2 | 43 | ank | 382 | 414 | 46.6 | 5.5e−10 |
| | TPR | 1119 | 1152 | 16.4 | 0.7 | ank | 415 | 447 | 39.7 | 6.7e−08 |
| | TPR | 1153 | 1186 | 25.6 | 0.0012 | ank | 448 | 480 | 42.6 | 9.1e−09 |
| | | | | | | ank | 481 | 513 | 40.2 | 4.7e−08 |
| | | | | | | ank | 514 | 546 | 49.7 | 6.5e−11 |
| | | | | | | ank | 547 | 579 | 43.6 | 4.5e−09 |
| | | | | | | ank | 580 | 612 | 38.3 | 1.7e−07 |
| | | | | | | ank | 613 | 645 | 47.2 | 3.6e−10 |
| | | | | | | ank | 646 | 678 | 36.3 | 7e−07 |
| | | | | | | ank | 679 | 711 | 42.7 | 8e−09 |
| | | | | | | ank | 712 | 744 | 43.8 | 3.9e−09 |
| | | | | | | ank | 745 | 777 | 41 | 2.8e−08 |
| | | | | | | ank | 778 | 810 | 2.2 | 1.1e+02 |
| | | | | | | ZU5 | 983 | 1087 | 229.6 | 4.4e−65 |
| | | | | | | death | 1479 | 1562 | 111.4 | 1.8e−29 |
| 53 | sosui | 16 | 38 | — | — | sosui | 9 | 30 | — | — |
| | Glyco_transf_29 | 218 | 512 | 243.2 | 3.6e−69 | Glyco_transf_29 | 107 | 401 | 448 | 8.2e−131 |
| 54 | GSPII_E | 1032 | 1046 | 8.6 | 0.092 | | | | | |
| 55 | UQ_con | 971 | 1136 | 0.9 | 2.6e−06 | | | | | |
| 57 | Ca_channel_B | 17 | 75 | 6.5 | 0.07 | | | | | |
| 58 | DAO | 43 | 404 | −61.8 | 0.00044 | DAO | 42 | 403 | −70.5 | 0.0014 |
| | Phytoene_dh | 45 | 406 | −331.1 | 0.19 | Phytoene_dh | 44 | 405 | −327.7 | 0.14 |
| | GCV_T | 523 | 863 | 556.6 | 1.6e−163 | UPF0079 | 52 | 149 | −47.5 | 0.26 |
| | | | | | | GCV_T | 522 | 862 | 593.6 | 1.2e−174 |
| 59 | TPR | 285 | 318 | 9.6 | 4.2 | TPR | 155 | 189 | 10.7 | 3.2 |
| | TPR | 327 | 360 | 21.6 | 0.018 | TPR | 198 | 231 | 30.9 | 3e−05 |
| | TPR | 369 | 402 | 8.6 | 5.4 | TPR | 240 | 273 | 31.3 | 2.2e−05 |
| | TPR | 435 | 468 | 19.9 | 0.06 | TPR | 282 | 315 | 15.1 | 1.1 |
| | TPR | 477 | 510 | 28.8 | 0.00013 | TPR | 324 | 357 | 30.1 | 5.3e−05 |
| | TPR | 519 | 552 | 23.6 | 0.0046 | TPR | 366 | 399 | 18.5 | 0.16 |
| | TPR | 561 | 594 | 36.5 | 6.1e−07 | TPR | 408 | 441 | 10.6 | 3.3 |
| | TPR | 603 | 636 | 19.7 | 0.071 | | | | | |
| 60 | | | | | | Myb_DNA-binding | 300 | 345 | 18.8 | 0.0011 |
| 61 | ACBP | 5 | 43 | −18.1 | 0.014 | ACBP | 42 | 130 | 199.3 | 5.9e−56 |
| | sosui | 405 | 427 | — | — | sosui | 503 | 524 | — | — |
| 62 | Dynein_heavy | 494 | 1192 | 444.2 | 1.1e−129 | | | | | |
| 63 | myosin_head | 147 | 282 | 81.9 | 3.4e−23 | myosin_head | 1208 | 1871 | 946.2 | 8.7e−281 |
| | MyTH4 | 561 | 673 | 33.9 | 2.1e−06 | IQ | 1887 | 1907 | 22.5 | 0.0097 |
| | SH3 | 1455 | 1511 | 8 | 0.013 | IQ | 1910 | 1930 | 26.1 | 0.00081 |
| | | | | | | MyTH4 | 2088 | 2195 | 71.8 | 1.4e−17 |
| | | | | | | MyTH4 | 3071 | 3185 | 108.4 | 1.4e−28 |
| 64 | WD40 | 61 | 98 | 22.4 | 0.011 | WD40 | 12 | 47 | 13.6 | 3.4 |
| | WD40 | 110 | 145 | 12.9 | 4.7 | WD40 | 64 | 100 | 19.9 | 0.059 |
| | WD40 | 150 | 187 | 25.3 | 0.0014 | | | | | |
| | WD40 | 289 | 324 | 13.6 | 3.4 | | | | | |
| | WD40 | 341 | 377 | 19.9 | 0.059 | | | | | |
| 65 | sosui | 152 | 174 | — | — | pkinase | 14 | 265 | 330.4 | 2e−95 |
| | | | | | | sosui | 193 | 215 | — | — |
| 66 | EGF | 12 | 47 | 20.7 | 0.035 | EGF | 127 | 162 | 25.5 | 0.0013 |
| | EGF | 53 | 86 | 10.6 | 2.5 | EGF | 168 | 203 | 43.5 | 4.6e−09 |
| | | | | | | EGF | 209 | 245 | 27.2 | 0.00038 |
| | | | | | | EGF | 251 | 286 | 29.2 | 9.5e−05 |
| | | | | | | EGF | 292 | 327 | 30.5 | 4e−05 |
| | | | | | | EGF | 338 | 373 | 27.2 | 0.0004 |
| | | | | | | EGF | 379 | 413 | 8.6 | 3.8 |
| | | | | | | EGF | 419 | 454 | 29.3 | 9e−05 |
| | | | | | | EGF | 524 | 555 | 21.3 | 0.022 |
| | | | | | | EGF | 568 | 598 | 23.2 | 0.0061 |
| | | | | | | EGF | 611 | 641 | 12.3 | 1.7 |
| | | | | | | EGF | 645 | 686 | 8.2 | 4.1 |
| | | | | | | EGF | 699 | 731 | 2.2 | 14 |
| | | | | | | EGF | 735 | 773 | 4.3 | 9.2 |
| | | | | | | EGF | 786 | 817 | 21.5 | 0.02 |
| | | | | | | EGF | 830 | 860 | 21.4 | 0.022 |
| | | | | | | EGF | 873 | 904 | 7.1 | 5.1 |
| | | | | | | EGF | 917 | 947 | 17.7 | 0.27 |
| | | | | | | EGF | 960 | 990 | 11.4 | 2.1 |
| | | | | | | EGF | 1003 | 1033 | 22.8 | 0.0079 |
| | | | | | | EGF | 1046 | 1076 | 21.6 | 0.018 |
| | | | | | | EGF | 1089 | 1119 | 28.6 | 0.00015 |
| | | | | | | EGF | 1132 | 1162 | 18.1 | 0.21 |
| | | | | | | EGF | 1175 | 1205 | 21.8 | 0.017 |
| | | | | | | EGF | 1209 | 1249 | 0.6 | 20 |
| | | | | | | EGF | 1262 | 1292 | 14.5 | 1.1 |
| | | | | | | EGF | 1305 | 1335 | 15 | 1 |
| | | | | | | EGF | 1348 | 1378 | 22.5 | 0.0099 |
| | | | | | | EGF | 1391 | 1421 | 19 | 0.12 |
| | | | | | | EGF | 1434 | 1464 | 16.5 | 0.62 |
| | | | | | | EGF | 1477 | 1507 | 9.2 | 3.3 |
| | | | | | | EGF | 1520 | 1550 | 14.2 | 1.2 |
| 67 | EGF | 157 | 187 | 10.9 | 2.3 | EGF | 127 | 162 | 25.5 | 0.0013 |
| | EGF | 200 | 230 | 15.6 | 0.88 | EGF | 168 | 203 | 43.5 | 4.6e−09 |
| | EGF | 243 | 273 | 27 | 0.00045 | EGF | 209 | 245 | 27.2 | 0.00038 |
| | EGF | 286 | 316 | 25.5 | 0.0012 | EGF | 251 | 286 | 29.2 | 9.5e−05 |
| | EGF | 329 | 359 | 26.1 | 0.0008 | EGF | 292 | 327 | 30.5 | 4e−05 |
| | EGF | 372 | 402 | 20 | 0.056 | EGF | 338 | 373 | 27.2 | 0.0004 |
| | EGF | 416 | 448 | 11.8 | 1.9 | EGF | 379 | 413 | 8.6 | 3.8 |
| | EGF | 461 | 491 | 23.2 | 0.006 | EGF | 419 | 454 | 29.3 | 9e−05 |
| | EGF | 504 | 534 | 24.9 | 0.0019 | EGF | 524 | 555 | 21.3 | 0.022 |
| | EGF | 547 | 577 | 23.9 | 0.0038 | EGF | 568 | 598 | 23.2 | 0.0061 |
| | EGF | 590 | 620 | 12.6 | 1.6 | EGF | 611 | 641 | 12.3 | 1.7 |
| | EGF | 633 | 663 | 21.6 | 0.019 | EGF | 645 | 686 | 8.2 | 4.1 |
| | EGF | 676 | 708 | 9.9 | 2.9 | EGF | 699 | 731 | 2.2 | 14 |
| | EGF | 721 | 751 | 15.8 | 0.84 | EGF | 735 | 773 | 4.3 | 9.2 |
| | EGF | 764 | 794 | 22 | 0.014 | EGF | 786 | 817 | 21.5 | 0.02 |
| | EGF | 807 | 837 | 18.6 | 0.15 | EGF | 830 | 860 | 21.4 | 0.022 |
| | EGF | 850 | 880 | 18.2 | 0.19 | EGF | 873 | 904 | 7.1 | 5.1 |
| | sosui | 909 | 930 | — | — | EGF | 917 | 947 | 17.7 | 0.27 |
| | | | | | | EGF | 960 | 990 | 11.4 | 2.1 |
| | | | | | | EGF | 1003 | 1033 | 22.8 | 0.0079 |
| | | | | | | EGF | 1046 | 1076 | 21.6 | 0.018 |
| | | | | | | EGF | 1089 | 1119 | 28.6 | 0.00015 |
| | | | | | | EGF | 1132 | 1162 | 18.1 | 0.21 |
| | | | | | | EGF | 1175 | 1205 | 21.8 | 0.017 |
| | | | | | | EGF | 1209 | 1249 | 0.6 | 20 |
| | | | | | | EGF | 1262 | 1292 | 14.5 | 1.1 |
| | | | | | | EGF | 1305 | 1335 | 15 | 1 |
| | | | | | | EGF | 1348 | 1378 | 22.5 | 0.0099 |
| | | | | | | EGF | 1391 | 1421 | 19 | 0.12 |
| | | | | | | EGF | 1434 | 1464 | 16.5 | 0.62 |
| | | | | | | EGF | 1477 | 1507 | 9.2 | 3.3 |
| | | | | | | EGF | 1520 | 1550 | 14.2 | 1.2 |
| 68 | | | | | | WH2 | 399 | 417 | 8.5 | 22 |
| | | | | | | WH2 | 463 | 480 | 17.2 | 0.38 |
| 69 | EGF | 45 | 81 | 43.6 | 4.4e−09 | EGF | 20 | 56 | 36.8 | 4.9e−07 |
| | TB | 96 | 137 | 42.8 | 7.5e−09 | EGF | 62 | 98 | 37.7 | 2.6e−07 |
| | EGF | 162 | 198 | 26.5 | 0.00063 | EGF | 104 | 138 | 31.9 | 1.5e−05 |
| | EGF | 204 | 241 | 19.5 | 0.078 | TB | 153 | 194 | 56.9 | 4.5e−13 |
| | | | | | | EGF | 207 | 243 | 39.4 | 8e−08 |
| | | | | | | TB | 258 | 299 | 74.2 | 2.8e−18 |
| | | | | | | EGF | 325 | 361 | 23.4 | 0.0055 |
| | | | | | | EGF | 367 | 404 | 18.3 | 0.18 |
| | | | | | | EGF | 410 | 446 | 35.7 | 1e−06 |
| | | | | | | EGF | 452 | 488 | 24.6 | 0.0024 |
| | | | | | | EGF | 494 | 529 | 27.7 | 0.00027 |
| | | | | | | EGF | 535 | 571 | 28.8 | 0.00013 |
| | | | | | | EGF | 577 | 613 | 17.4 | 0.33 |
| | | | | | | EGF | 619 | 654 | 26.5 | 0.00061 |
| | | | | | | Plexin_repeat | 625 | 674 | 4.9 | 0.73 |
| | | | | | | EGF | 660 | 695 | 31.8 | 1.5e−05 |
| | | | | | | EGF | 701 | 737 | 34.8 | 2e−06 |
| 70 | zf-C2H2 | 44 | 67 | 6.3 | 19 | zf-C2H2 | 21 | 43 | 20.9 | 0.031 |
| | zf-C2H2 | 101 | 124 | 4.3 | 31 | zf-C2H2 | 50 | 73 | 17.6 | 0.3 |
| | zf-C2H2 | 202 | 225 | 16.1 | 0.87 | zf-C2H2 | 79 | 102 | 15 | 1.8 |
| | zf-C2H2 | 247 | 270 | 5.6 | 23 | | | | | |
| | zf-C2H2 | 309 | 332 | 15.5 | 1.3 | | | | | |
| | zf-C2H2 | 392 | 415 | 16.1 | 0.84 | | | | | |
| | zf-C2H2 | 429 | 452 | 6.3 | 20 | | | | | |
| | zf-C2H2 | 499 | 522 | 1.8 | 55 | | | | | |
| | zf-C2H2 | 578 | 601 | 4.5 | 29 | | | | | |
| | zf-C2H2 | 624 | 646 | 18.9 | 0.12 | | | | | |
| | zf-C2H2 | 700 | 722 | 11 | 6.7 | | | | | |
| | zf-C2H2 | 784 | 806 | 19.1 | 0.1 | | | | | |
| | zf-C2H2 | 818 | 840 | 20.9 | 0.031 | | | | | |
| | zf-C2H2 | 847 | 870 | 17.6 | 0.3 | | | | | |
| | zf-C2H2 | 876 | 899 | 15 | 1.8 | | | | | |
| | zf-C2H2 | 984 | 1007 | 3.8 | 35 | | | | | |
| | zf-C2H2 | 1013 | 1036 | 15.4 | 1.4 | | | | | |
| | zf-C2H2 | 1047 | 1069 | 12.8 | 4.4 | | | | | |
| | zf-C2H2 | 1093 | 1115 | 20.5 | 0.039 | | | | | |
| | zf-C2H2 | 1121 | 1144 | 16.6 | 0.58 | | | | | |
| | zf-C2H2 | 1207 | 1229 | 27.4 | 0.00034 | | | | | |

[0120] TABLE 5
Complete notation of each functional domain

| Abbreviated notation | Complete notation |
|---|---|
| A_deamin | Adenosine-deaminase (editase) domain |
| ACBP | Acetyl CoA binding protein |
| AMP-binding | AMP-binding enzyme |
| ank | Ank repeat |
| Armadillo_{—} | Armadillo/beta-catenin-like repeat |
| seg | |
| BNR | BNR repeat |
| BR01 | BR01-like domain |
| BTB | BTB/POZ domain |
| C2 | C2 domain |
| Ca_channel_B | Dihydropyridine sensitive L-type calcium |
| | channel (Beta subunit) |
| cadherin | Cadherin domain |
| chromo | ‘chromo’ (CHRomatin Organization MOdifier) |
| | domain |
| COLFI | Fibrillar collagen C-terminal domain |
| Collagen | Collagen triple helix repeat (20 copies) |
| DAO | FAD dependent oxidoreductase |
| DDHD | DDHD domain |
| death | Death domain |
| DENN | DENN (AEX-3) domain |
| Dynein_heavy | Dynein heavy chain |
| EGF | EGF-like domain |
| F5_F8_type_C | F5/8 type C domain |
| FH2 | Formin Homology 2 Domain |
| GCV_T | Glycine cleavage T-protein (aminomethyl |
| | transferase) |
| Glyco_hydro_47 | Glycosyl hydrolase family 47 |
| Glyco_transf_29 | Glycosyltransferase family 29 |
| | (sialyltransferase) |
| GRAM | GRAM domain |
| GSPII_E | Bacterial type II secretion system protein |
| HEAT | HEAT repeat |
| HR1 | Hr1 repeat motif |
| integrin_B | Integrins, beta chain |
| IQ | IQ calmodulin-binding motif |
| Kelch | Kelch motif |
| KRAB | KRAB box |
| Laminin_EGF | Laminin EGF-like |
| | (Domains III and V) |
| laminin_G | Laminin G domain |
| Laminin_Nterm | Laminin N-terminal |
| | (Domain VI) |
| myb_DNA-binding | Myb-like DNA-binding domain |
| myosin_head | Myosin head (motor domain) |
| MyTH4 | MyTH4 domain |
| Oxysterol_BP | Oxysterol-binding protein |
| PDZ | PDZ domain |
| | (Also known as DHR or GLGF). |
| PH | PH domain |
| Phytoene_dh | Phytoene dehydrogenase related enzyme |
| pkinase | Protein kinase domain |
| Plexin_repeat | Plexin repeat |
| Pro_dh | Proline dehydrogenase |
| RasGEF | RasGEF domain |
| RasGEFN | Guanine nucleotide exchange factor |
| | for Ras-like GTPases; |
| | N-terminal motif |
| RhoGAP | RhoGAP domain |
| RhoGEF | RhoGEF domain |
| SAM | SAM domain |
| | (Sterile alpha motif) |
| Sema | Sema domain |
| SH3 | SH3 domain |
| spectrin | Spectrin repeat |
| TB | TB domain |
| TIG | IPT/TIG domain |
| TPR | TPR Domain |
| Troponin | Troponin |
| TSPN | Thrombospondin |
| | N-terminal-like domain |
| tubulin | Tubulin/FtsZ family |
| tubulin-binding | Tau and MAP protein, |
| | Tubulin-binding repeat |
| UBA | UBA/TS-N domain |
| UPF0079 | Uncharacterised P-loop |
| | hydrolase UPF0079 |
| UQ_con | Ubiquitin-conjugating enzyme |
| WD40 | WD domain, G-beta repeat |
| WH2 | WH2 motif |
| WW | WW domain |
| Xlink | Extracellular link domain |
| zf-BED | BED zinc finger |
| zf-C2H2 | Zinc finger, C2H2 type |
| ZU5 | ZU5 domain |

(5) Expression Site

[0121] Expressions in the tissue and the sites of the brain were examined by RT-PCR ELISA. Table 6 lists the sites showing the strongest expression.

(6) Chromosome Position

[0122] Using the DNA nucleotide sequences of the clones as queries, an analysis program BLASTN 2.0.14 (the above-mentioned “Gapped BLAST and PSI-BLAST: a new generation of protein database search programs”) was run on human genome sequences corresponding to the library of known sequences, Genbank release 119. The description of the chromosome number from which the clone had been derived was extracted from the definitions for the matched clones as listed in Table 6.

TABLE 6
Expression site of each gene and chromosome
position of homologous gene

| | | | Chromosome |
|---|---|---|---|
| | Expression site | | position |
| SEQ ID NO: | Tissue | Brain | Position |
| 1 | Brain | Caudate nucleus | — |
| 2 | Ovary | Cerebellum | — |
| 3 | Brain | — | — |
| 4 | Brain | Nucleus of hypothalamus | — |
| 5 | Brain | Caudate nucleus | 2 |
| 6 | Kidney | Caudate nucleus | — |
| 7 | Ovary | Spinal cord | 20 |
| 8 | Brain | Substantia nigra | 7 |
| 9 | Ovary | Amygdaloid body | — |
| 10 | Brain | Caudate nucleus | 20 |
| 11 | Ovary | Thalamus | 7 |
| 12 | Brain | Amygdaloid body | — |
| 13 | Ovary | Substantia nigra | 9 |
| 14 | Brain | Caudate nucleus | 22 |
| 15 | Brain | Thalamus | 19 |
| 16 | Kidney | Spinal cord | 7 |
| 17 | Skeletal muscle | Caudate nucleus | 19 |
| 18 | Brain | Spinal cord | 7 |
| 19 | Heart | Amygdaloid body | 9 |
| 20 | — | — | — |
| 21 | Brain | Hippocampus | 17 |
| 22 | Brain | Spinal cord | — |
| 23 | Orchis | Corpus callosum | — |
| 24 | Kidney | Thalamus | 7 |
| 25 | — | Nucleus of hypothalamus | 22 |
| 26 | — | — | 3 |
| 27 | Brain | Thalamus | 22 |
| 28 | Brain | Cerebellum | 2 |
| 29 | Brain | Spinal cord | 16 |
| 30 | Brain | Caudate nucleus | 8 |
| 31 | Ovary | Nucleus of hypothalamus | 1 |
| 32 | Heart | Amygdaloid body | 18 |
| 33 | Brain | Caudate nucleus | 3 |
| 34 | Ovary | Caudate nucleus | 2 |
| 35 | Ovary | Thalamus | 7 |
| 36 | Ovary | Spinal cord | 11 |
| 37 | Brain | Cerebellum | 14 |
| 38 | Brain | Cerebellum | — |
| 39 | Ovary | Spinal cord | 17 |
| 40 | Ovary | Corpus callosum | 16 |
| 41 | Ovary | Cerebellum | — |
| 42 | Kidney | Spinal cord | — |
| 43 | Brain | Thalamus | 19 |
| 44 | Brain | Corpus callosum | — |
| 45 | Kidney | Cerebellum | X |
| 46 | Brain | Spinal cord | 22 |
| 47 | Brain | Amygdaloid body | 3 |
| 48 | Ovary | Spinal cord | 17 |
| 49 | Skeletal muscle | Amygdaloid body | 22 |
| 50 | Skeletal muscle | Thalamus | 3 |
| 51 | Skeletal muscle | Spinal cord | — |
| 52 | Ovary | Hippocampus | — |
| 53 | Brain | Cerebellum | 2 |
| 54 | — | — | 3 |
| 55 | Brain | Thalamus | — |
| 56 | Kidney | Spinal cord | 5 |
| 57 | Brain | Caudate nucleus | 11 |
| 58 | — | — | 16 |
| 59 | Kidney | Spinal cord | 3 |
| 60 | — | — | 5 |
| 61 | Brain | Substantia nigra | 10 |
| 62 | Ovary | Caudate nucleus | 11 |
| 63 | — | — | 17 |
| 64 | Skeletal muscle | Spinal cord | 14 |
| 65 | Brain | Substantia nigra | 19 |
| 66 | Brain | Caudate nucleus | 3 |
| 67 | Brain | Hippocampus | 5 |
| 68 | — | — | 16 |
| 69 | — | — | 19 |
| 70 | Brain | Caudate nucleus | 19 |

[0123] According to the above information on homology, homologous genes, each domain, expression sites, chromosome positions and the like, a person skilled in the art can predict based on the grounds shown in Table 1 that the DNAs or the genes of the present invention respectively have each function described in Table 1.

### INDUSTRIAL APPLICABILITY

[0124] A single nucleotide polymorphism, SNP, which is a change in one base (nucleotide) among individuals in the DNA or the gene of the present invention, can be found by performing PCR using synthetic DNA primers prepared based on the nucleotide sequence of the DNA or the gene of the present invention or a part thereof, and using chromosome DNA extracted from human blood or tissue so as to determine the nucleotide sequence of the product. Therefore, individual constitution or the like can be predicted, which enables the development of a pharmaceutical preparation suitable for each individual.

[0125] Further, when ortholog (homolog, counterpart) genes for the DNA or the gene of the present invention in model organisms, such as mice, are isolated with cross hybridization, for example, these genes are knocked out to produce human disease model animals, so that the causative genes which cause human diseases can be searched and identified.

[0126] DNA chip, polypeptide chip and antibody chip can be respectively prepared by arraying the DNAs and the polypeptides of the present invention, and antibodies for the polypeptides of the present invention. Specifically, novel DNAs or genes obtained by the present invention are assembled on a so-called DNA chip, and then probes prepared using blood or tissue derived from patients with diseases that relate to the brain, such as mental disease, or as a control using blood or tissue from healthy individuals are hybridized to the chip, so that the chip can be applied to diagnosis and treatment for the diseases. Moreover, antibody chip, on which the antibodies against the polypeptides of the present invention are thoroughly prepared and arrayed, can be applied to diagnosis, treatment of diseases and the like through proteome analysis, such as detection of a difference in expression amount of a protein between a patient and a healthy individual.

[0127] The present application asserts priority based on the three specifications of Japanese Patent Application Nos. 2000-389742, 2001-95524 and 2001-127066, and includes by reference all of the contents as disclosed in these specifications.

The application's sequence listing, which the Patent Office published only in electronic form, follows.

SEQUENCE LISTING (140 sequences)

SEQ ID NO: 1 - protein, 323 aa, Homo sapiens
LHAARSGYMCRGGGAMCAGEEERCAQGRGLQLWSLEVWGIGFGKARKRKGASGGPEVAREGGAGLVTPPVLGQNNFEEPVALQEMDTSNGVLLPFYDPDSSIVYLCGKVLTAGQGEQGTGWRCGGPCPGAPLNRLILQGDSSIRYFEITDEPPFVHYLNTFSSKEPQRGMGFMPKRGLDVSKCEIARFYKLHERKCEPIIMTVPRKSDLFQDDLYPDTPGPEPALEADEWLSGQDAEPVLISLRDGYVPPKHRELRVTKRNIPDVRPPSGPRRSQSASDAPLSQHTLETLLEEIKALRERVQAQEQRITALENMLCELVDGTD

SEQ ID NO: 2 - protein, 314 aa, Homo sapiens
FAYRSAFIVHKKKHAMKRKPEGGPSFSQDTVFQVPQSSHSKEEPYKCSQCGKAFRNHSFLLIHQRVHTGEKPYKCRECGKAFRWSSNLYRHQRIHSLQKQYDCHESEKTPNVEPKILTGEKRFWCQECGKTFTRKRTLLDHKGIHSGEKRYKCNLCGKSYDRNYRLVNHQRIHSTERPFKCQWCGKEFIGRHTLSSHQRKHTRAAQAERSPPARSSSQDTKLRLQKLKPSEEMPLEDCKEACSQSSRLTGLQDISIGKKCHKCSICGKTFNKSSQLISHKRFHTRERPFKCSKCGKTFRWSSNLARHMKNHIRD

SEQ ID NO: 3 - protein, 187 aa, Homo sapiens
TVLGVPEKPQISGFSSPVMEGDLMQLTCKTSGSKPAADIRWFKNDKEIKDVKYLKEEDANRKTFTVSSTLDFRVDRSDDGVAVICRVDHESLNATPQVAMQVLEIHYPNALAGQNGPDHALIGGIVAVVVFVTLCSIFLLGRYLARHKGTYLTNEAKGAEDAPDADTAIINAEGSQVNAEEKKEYFI

SEQ ID NO: 4 - protein, 1479 aa, Homo sapiens
IGCEQAGVEYRLVQDAYLSRPGRALAHQLGLAEDEDVLFTVFAQGQKNRVKPPKESALCLFTLRAIKEKIKERIQSCYRGEGKLSLPWLLNKELGCINSPLQIDDDFCGQDFNQPLGGTVTIEGTPLFVDKDDGLTAVAAYDYRGRTVVFAGTRSGRIRKILVDLSNPGGRPALAYESVVAQEGSPILRDLVLSPNHQYLYAMTEKQVTRVPVESCVQYTSCELCLGSRDPHCGWCVLHSICSRRDACERADEPQRFAADLLQCVQLTVQPRNVSVTMSQVPLVLQAWNVPDLSAGVNCSFEDFTESESVLEDGRIHCRSPSAREVAPITRGQGDQRVVKLYLKSKETGKKFASVDFVFYNCSVHQSCLSCVNGSFPCHWCKYRHVCTHNVADCAFLEGRVNVSEDCPQILPSTQIYVPVGVVKPITLAARNLPQPQSGQRGYECLFHIPGSPARVTALRFNSSSLQCQNSSYSYEGNDVSDLPVNLSVVWNGNFVIDNPQNIQAHLYKCPALRESCGLCLKADPRFECGWCVAERRCSLRHHCAADTPASWMHARHGSSRCTDPKILKLSPETGPRQGGTRLTITGENLGLRFEDVRLGVRVGKVLCSPVESEYISAEQIVCEIGDASSVRAHDALVEVCVRDCSPHYRALSPKRFTFVTPTFYRVSPSRGPLSGGTWIGIEGSHLNAGSDVAVSVGGRPCSFSWRNSREIRCLTPPGQSPGSAPIIININRAQLTNPEVKYNYTEDPTILRIDPEWSINSGGTLLTVTGTNLATVREPRIRAKYGGIERENGCLVYNDTTMVCRAPSVANPVRSPPELGERPDELGFVMDNVRSLLVLNSTSFLYYPDPVLEPLSPTGLLELKPSSPLILKGRNLLPPAPGNSRLNYTVLIGSTPCTLTVSETQLLCEAPNLTGQHKVTVRAGGFEFSPGTLQVYSDSLLTLPAIVGIGGGGGLLLLVIVAVLIAYKRKSRDADRTLKRLQLQMDNLESRVALECKEAFAELQTDIHELTNDLDGAGIPFLDYRTYAMRVLFPGIEDHPVLKEMEVQANVEKSLTLFGQLLTKKHFLLTFIRTLEAQRSFSMRDRGNVASLIMTALQGEMEYATGVLKQLLSDLIEKNLESKNHPKLLLRRTESVAEKMLTNWFTFLLYKFLKECAGEPLFMLYCAIKQQMEKGPIDAITGEARYSLSEDKLIRQQIDYKTLTLNCVNPENENAPEVPVKGLDCDTVTQAKEKLLDAAYKGVPYSQRPKAADMDLEWRQGRMARIILQDEDVTTKIDNDWKRLNTLAHYQVTDGSSVALVPKQTSAYNISNSSTFTKSLSRYGEGPGSGREGSAWVPGLGRTSPGLPRCSSRTGGPRGRCQACHSHSWPYPPALEAAPPRDCVSVHNYATSVVSSAAPKSHMGGGAIPSFQMGKQARAGGAGCQPTRALTAWCCREHAAHGQQPRQPALAHAHDHARPGERHQAVAPGEEPRPPGPA

SEQ ID NO: 5 - protein, 258 aa, Homo sapiens
HTHAHRGACSHTHTQPCHLSASVQNSAFPPNLCLMCRGPGQVSGNVTDAALGACPGEGHCGHSLPDALSPLQSVPIISHSRWLLKQGELQQMSGPKTSRTLRTKKLFHEIYLFLFNDLLVICRQIPGDKYQVFDSAPRGLLRVEELEDQGQTLANVFILRLLENADDREATYMLKASSQSEMKRWMTSLAPNRRTKFVSFTSRLLGKSPVGKGAPFVLGLALPDAAGARCALPGGKPSLSWWSQRPARASRGCFLLET

SEQ ID NO: 6 - protein, 675 aa, Homo sapiens
TAPPTFPALTPGFPGIFPPSLYPRPPLLPPTPLLKSPLNHTQDAKLPSPLGNPALPLVSAVSNSSQGTTAAAGPEEKFESRLEDSCVEKLKTRSSDMSDGSDFEDVNTTTGTDLDTTTGTGSDLDSDVDSDLDKDKGKGKSAEGQPKFGGGLAPPGAPNSVAEVPVFYSQHSFFPPPDEQLLTATGAAGDSIKAIASIAEKYFGPGFMGMQEKKLGSLPYHSAFPFQFLPNFPHSLYPFTDRALAHNLLVKAEPKSPRDALKVGGPSAECPFDLTTKPKDVKPILPMPKGPSAPASGEEQPLDLSIGSRARASQNGGGREPRKNHVYGERKLGAGEGLPQVCPARMPQQPPLHYAKPSPFFMDPIYRVEKRKVTDPVGALKEKYLRPSPLLFHPQMSAIETMTEKLESFAAMKADSGSSLQPLPHHPFNFRSPPPTLSDPILRKGKERYTCRYCGKIFPRSANLTRHLRTHTGEQPYRCKYCDRSFSISSNLQRHVRNIHNKEKPFKCHLCNRCFGQQTNLDRHLKKHEHENAPVSQHPGVLTNHLGTSASSPTSESDNHALLDEKEDSYFSEIRNFIANSEMNQASTRTEKRADMQIVDGSAQCPGLASEKQEDVEEEDDDDLEEDDEDSLAGKSQDDTVSPAPEPQAAYEDEEDEEPAASLAVGFDHTRRHMQ

SEQ ID NO: 7 - protein, 248 aa, Homo sapiens
DIGWITGHSYVVYGPLCNGATSVLFESTPVYPNAGRYWETVERLKINQFYGAPTAVRLLLKYGDAWVKKYDRSSLRTLGSVGEPINCEAWEWLHRVVGDSRCTLVDTWWQTETGGICIAPRPSEEGAEILPAMAMRPFFGIVPVLMDEKGSVVEGSNVSGALCISQAWPGMARTIYGDHQRFVDAYFKAYPGYYFTGDGAYRTEGGYYQITGRMDDVINISGHRLGTAEIEDAIVSTGWASSFTPTPP

SEQ ID NO: 8 - protein, 193 aa, Homo sapiens
RGCYSGWMSCPRRAVPLGQRAGALGTRDSCRRGHLPHLSNSCSHSPTPCASQKATEMGVRLMVDAEQTYFQPAISRLTLEMQRKFNVEKLLIFNTYQCYLKDAYDNVTLDMELAHREGWCFGAKPVRGAYLAQERACAAEIGYEDPINPMYEATNTMYHRCLDYVLEELKHNAKAKVMVASHNEDTVRFALRR

SEQ ID NO: 9 - protein, 373 aa, Homo sapiens
GMRAILKMGQLCGDHPLGAVTFRCVALVAVWLCGTATRSHVGKDSCGLGTELSLLGVSRCWGEGRQSSQSPSTAHPAARPWPVNPPSPFLPQEAVEKVTQHIHGLSGKKDGLVPMFINTHSGLFTHLGVFTLGARADSYYEYLLKQWIQGGKQETQLLEDYVEAIEGVRTHLLRHSEPSKLTFVGELAHGRFSAKMDHLVCFLPGTLALGVYHGLPASHMELAQELMETCYQMNRQMETGLSPEIVHFNLYPQPGRRDVEVKPADRHNLLRPETVESLFYLYRVTGDRKYQDWGWEILQSFSRFTRVPSGGYSSINNVQDPQKPEPRDKMESFFLGETLKYLFLLFSDDPNLLSLDAYVFNTEAHPLPIWTPA

SEQ ID NO: 10 - protein, 215 aa, Homo sapiens
PSRTLRQASHESIEDSMNSYGSEGNLNYGGVCLASDAQFSDFLGSMGPAQFVGRQTLATTPMGDVEIGLQERNGQLEVDIIQARGLTAKPGSKTLPAAYIKAYLLENGICIAKKKTKVARKSLDPLYNQVLLFPESPQGKVLQVIVWGNYGRMERKQFMGVARVLLEELDLTTLAVGWYKLFPTSSMVDPATGPLLRQASQLSLESTVGPCGERS

SEQ ID NO: 11 - protein, 1134 aa, Homo sapiens
RLALSPEDKPIRLSPSKITEPLREGPEEEPLAEREVKAEVEDMDEGPTELPPLESPLPLPAAEAMATPSPAGGCGGGLLEAQALSATGQSCAEPSECPDFVEGPEPRVDSPGRTEPCTAALDLGVQLTPETLVEAKEEPVEVPVGVPVVEAVPEEGLAQVAPSESQPTLEMSDCDVPAGEGQCPSLEPQEAVPVLGSTCFLEEASSDQFLPSLEDPLAGMNALAAAAELPQARPLPSPGAAGAQALEKLEAAESLVLEQSFLHGITLLSEIAELELERRSQEMGGAERALVARPSLESLLAAGSHMLREVLDGPVVDPLKNLRLPRELKPNKKYSWMRKKEERMYAMKSSLEDMDALELDFRMRLAEVQRQYKEKQRELVKLQRRRDSEDRREEPHRSLARRGPGRPRKRTHAPSALSPPRKRGKSGHSSGKLSSKSLLTSDDYELGAGIRKRHKGSEEEHDALIGMGKARGRNQTWDEHEASSDFISQLKIKKKKMASDQEQLASKLDKALSLTKQDKLKSPFKFSDSAGGKSKTSGGCGRYLTPYDSLLGKNRKALAKGLGLSLKSSREGKHKRAAKTRKMEVGFKARGQPKSAHSPFASEVSSYSYNTDSEEDEEFLKDEWPAQGPSSSKLTPSLLCSMVAKNSKAAGGPKLTKRGLAAPRTLKPKPATSRKQPFCLLLREAEARSSFSDSSEESFDQDESSEEEDEEEELEEEDEASGGGYRLGARERALSPGLEESGLGLLARFAASALPSPTVGPSLSVVQLEAKQKARKKEERQSLLGTEFEYTDSESEVKVRKRSPAGLLRPKKGLGEPGPSLAAPTPGARGPDPSSPDKAKLAVEKGRKARKLRGPKEPGFEAGPEASDDDLWTRRRSERIFLHDASAAAPAPVSTAPATKTSRCAKGGPLSPRKDAGRAKDRKDPRKKKKGKEAGPGAGLPPPRAPALPSEARAPPPPPPPPPHPPLPPPPLPPPPLPLRLPPLPPPPLPRPHPPPPPPLPPLLPPPQTRTLPAARTMRQPPPPRLALPRRRRSPPRPPSRPARRGPRPTPQARRRPRPSPRRLLRSPHSLCSPRLRPGPRADPRRERASTSPPPRSWPSGSACRPWRTGPRSPPSCQPGSSGSGSASPPSGVA

SEQ ID NO: 12 - protein, 438 aa, Homo sapiens
PRRCLSRASLGRASADCAAMLHLLALFLHCLPLASGDYDICKSWVTTDEGPTWEFYACQPKVMRLKDYVKVKVEPSGITCGDPPERFCSHENPYLCSNECDASNPDLAHPPRLMFDKEEEGLATYWQSITWSRYPSPLEANITLSWNKTVELTDDVVMTFEYGRPTVMVLEKSLDNGRTWQPYQFYAEDCMEAFGMSARRARDMSSSSAHRVLCTEEYSRWAGSKKEKHVRFEVRDRFAIFAGPDLRNMDNLYTRLESAKGLKEFFTLTDLRMRLLRPALGGTYVQRENLYKYFYAISNIEVIGRCKCNLHANLCSMREGSLQCECEHNTTGPDCGKCKKNFRTRSWRAGSYLPLPHGSPNACAAAGSFGTTLRLSQELHQCCFGKRDRTFCRSLGPWVGSLLLLPPTPLLSPGSGRAVSPASQEWGDLPPPGAESTP

SEQ ID NO: 13 - protein, 505 aa, Homo sapiens
QSSDLAVPTMAGPPPSTVDGPLSASQESSFHGNTVCLPSETSFTDSEPPAGKDGHPRDPSAVSGVPGKDSRDGSERAPKSPDALESAQSEEEVDELSLIDHNEIMSRLTLKQEGDDGPDVRGGSGDILLVHATETDRKDLVLYCEAFLTTYRTFISPEELIKKLQYRYEKFSPFADTFKKRVSKNTFFVLVRVVDELCLVELTEEILKLLMELVFRLVCNGELSLARVLRKNILDKVDQKKLLRCATSSQPLAARGVAARPGTLHDFHSHEIAEQLTLLDAELFYKIEIPEVLLWAKEQNEEKSPNLTQFTEHFNNMSYWVRSIIMLQEKAQDRERLLLKFIKIMKHLRKLNNFNSYLAILSALDSAPIRRLEWQKQTSEGLAEYCTLIDSSSSFRAYRAALSEVEPPCIPYLGLILQDLTFVHLGNPDYIDGKVNFSKRWQQFNILDSMRCFQQAHYDMRRNDDIINFFNDFSDHLAEEALWELSLKIKPRNITRRKTDREEKT

SEQ ID NO: 14 - protein, 572 aa, Homo sapiens
CPTLPPTRGPRRLLFLTATLASSVCRSPGEPTSLVNMASEDIAKLAETLAKTQVAGGQLSFKGKSLKLNTAEDAKDVIKEIEDFDSLEALRLEGNTVGVEAARVIAKALEKKSELKRCHWSDMFTGRLRTEIPPALISLGEGLITAGAQLVELDLSDNAFGPDGVQGFEALLKSSACFTLQELKLNNCGMGIGGGKILAAALTECHRKSSAQGKPLALKVFVAGRNRLENDGATALAEAFRVIGTLEEVHMPQNGINHPGITALAQAFAVNPLLRVINLNDNTFTEKGAVAMAETLKTLRQVEVINFGDCLVRSKGAVAIADAIRGGLPKLKELNLSFCEIKRDAALAVAEAMADKAELEKLDLNGNTLGEEGCEQLQEVLEGFNMAKVLASLSDDEDEEEEEEGEEEEEEAEEEEEEDEEEEEEEEEEEEEEPQQRGQGEKSATPSRKILDPNTGEPAPVLSSPPPADVSTFLAFPSPEKLLRLGPKSSVLIAQQTDTSDPEKVVSAFLKVSSVFKDEATVRMAVQDAVGNVGWVRPGCPLSLDARGPQVSFVVAVTRQPQRSHGNCSLAT

SEQ ID NO: 15 - protein, 1051 aa, Homo sapiens
GQSVGGRGLFRDCACIEETTGAGALSRSGAGPLDVEAAGPSPSRCEGGGSLRARSRGQRHGPPWDEGSSLGPMRIRRAPPPPPVARFHIPPPALPSPRLRGRGWRSWRGPRTWAGVDRRPPPVRRGRSRRHAATAASGAPPGSHTEPQRPSADPGPYLRSLPCAMDWQPDEQGLQQVLQLLKDSQSPNTATQRIVQDKLKQLNQFPDFNNYLIFVLTRLKSEDEPTRSLSGLILKNNVKAHYQSFPPPVADFIKQECLNNIGDASSLIRATIGILITTIASKGELQMWPELLPQLCNLLNSEDYNTCEGAFGALQKICEDSSELLDSDALNRPLNIMIPKFLQFFKHCSPKIRSHAIACVNQFIMDRAQALMDNIDTFIEHLFALAVDDDPEVRKNVCRALVMLLEVRIDRLIPHMHSIIQYMLQRTQDHDENVALEACEFWLTLAEQPICKEVLASHLVQLIPILVNGMKYSEIDIILLKGDVEEDEAVPDSEQDIKPRFHKSRTVTLPHEAERPDGSEDAEDDDDDDALSDWNLRKCSAAALDVLANVFREELLPHLLPLLKGLLFHPEWVVKESGILVLGAIAEGCMQGMVPYLPELIPHLIQCLSDKKALVRSIACWTLSRYAHWVVSQPPDMHLKPLMTELLKRILDGNKRVQEAACSAFATLEEEACTELVPYLSYILDTLVFAFGKYQHKNLLILYDAIGTLADSVGHHLNQPEYIQKLMPPLIQKWNELKDEDKDLFPLLECLSSVATALQSGFLPYCEPVYQRCVTLVQKTLAQAMMYTQHPEQYEAPDKDFMIVALDLLSGLAEGLGGHVEQLVARSNIMTLLFQCMQDSMPEVRQSSFALLGDLTKACFIHVKPCIAEFMPILGTNLNPEFISVCNNATWAIGEICMQMGAEMQPYVQMVLNNLVEIINRPNTPKTLLENTAITIGRLGYVCPQEVAPMLQQFIRPWCTSLRNIRDNEEKDSAFRGICMMIGVNPGGVVQDFIFFCDAVASWVSPKDDLRDMFYKILHGFKDQVGEDNWQQFSEQFPPLLKERLAAFYGV

SEQ ID NO: 16 - protein, 887 aa, Homo sapiens
SKICRTRVRRKVGQSSSDVASARDWWSTILGDKEEFDQGCLCLANVDNSGNGQDKIIVGSFMGYLRIFSPHPAKTGDGAQAEDLLLEVDLRDPVLQVEVGKFVSGTEMLHLAVLHSRKLCVYSVSGTLGNVEHGNQCQMKLMYEHNLQRTACNMTYGSFGGVKGRDLICIQSMDGMLMVFEQESYAFGRFLPGFLLPGPLAYSSRTDSFLTVSSCQQVESYKYQVLAFATDADKRQETEQQKLGSGKRLVVDWTLNIGEQALDICIVSFNQSASSVFVLGERNFFCLKDNGQIRFMKKLDWSPSCFLPYCSVSEGTINTLIGNHNNMLHIYQDVTLKWATQLPHIPVAVRVGCLHDLKGVIVTLSDDGHLQCSYLGTDPSLFQAPNVQSRELNYDELDVEMKELQKIIKDVNKSQGVWPMTEREDDLNVSVVVSPNFDSVSQATDVEVGTDLVPSVTVKVTLQNRVILQKAKLSVYVQPPLELTCDQFTFEFMTPDLTRTVSFSVYLKRSYTPSELEGNAVVSYSRPTDRNPDGIPRVIQCKFRLPLKLICLPGQPSKTASHKITIDTNKSPVSLLSLFPGFASQSDDDQVNVMGFHFLGGARITVLASKTSQRYRIQSEQFEDLWLITNELILRLQEYFEKQGVKDFACSFSGSIPLQEYFELIDHHFELRINGEKLEELLSERAVQFRAIQRRLLARFKDKTPAPLQHLDTLLDGTYKQVIALADAVEENQGNLFQSFTRLKSATHLVILLIALWQKLSADQVAILEAAFLPLQEDTQELGWEETVDAAISHLLKTCLSKSSKEQALNLNSQLNIPKDTSQLKKHITLLCDRLSKGGRLCLSTDAAAPQTMVMPDPRTGQRIEAWTLRIPHSLSQHLQLMEGPKS

SEQ ID NO: 17 - protein, 689 aa, Homo sapiens
KMSSRTVLAPGNDRNSDTHGTLGSGRSSDKGPSWSSRSLGARCRNSIASCPEEQPHVGNYRLLRTIGKGNFAKVKLARHILTGREVAIKIIDKTQLNPSSLQKLFREVRIMKGLNHPNIVKLFEVIETEKTLYLVMEYASAGEVFDYLVSHGRMKEKEARAKFRQIVSAVHYCHQKNIVHRDLKAENLLLDAEANIKIADFGFSNEFTLGSKLDTFCGSPPYAAPELFQGKKYDGPEVDIWSLGVILYTLVSGSLPFDGHNLKELRERVLRGKYRVPFYMSTDCESILRRFLVLNPAKRCTLEQIMKDKWINIGYEGEELKPYTEPEEDFGDTKRIEVMVGMGYTREEIKESLTSQKYNEVTATYLLLGRKTEEGGDRGAPGLALARVRAPSDTTNGTSSSKGTSHSKGQRSSSSTYHRQRRHSDFCGPSPAPLHPKRSPTSTGEAELKEERLPGRKASCSTAGSGSRGLPPSSPMVSSAHNPNKAEIPERRKDSTSTPNNLPPSMMTRRNTYVCTERPGAERPSLLPNGKENSSGTPRVPPASPSSHSLAPPSGERSRLARGSTIRSTFHGGQVRDRRAGGGGGGGVQNGPPASPTLAHEAAPLPAGRPRPTTNLFTKLTSKLTRRVTLDPSKRQNSNRCVSGASLPQGSKIRSQTNLRESGDLRSQVAIYLGIKRKPPPGCSDSPGV

SEQ ID NO: 18 - protein, 1004 aa, Homo sapiens
VILPSAATKTIHRFNCGTCRLCRFSPGHVSGWSPSLTPLLMSGGPAPLAGRPTLLQQAAAQGNVTLLSMLLNEEGLDINYSCEDGHSALYSAAKNGHTDCVRLLLSAEAQVNAADKNGFTPLCAAAAQGHFECVELLISYDANINHAADGGQTPLYLACKNGNKECIKLLLEAGTNRSVKTTDGWTPVHAAVDTGNVDSLKLLMYHRIPAHGNSFNEEESESSVFDLDGGEESPEGISKPVVPADLINHANREGWTAAHIAASKGFKNCLEILCRHGGLEPERRDKCNRTVHDVATDDCKHLLENLNALKIPLRISVGEIEPSNYGSDDLECENTICALNIRKQTSWDDFSKAVSQALTNHFQAISSDGWWSLEDVTCNNTTDSNIGLSARSIRSITLGNVPWSVGQSFAQSPWDFMRKNKAEHITVLLSGPQEGCLSSVTYASMIPLQMMQNYLRLVEQYHNVIFHGPEGSLQDYIVHQLALCLKHRQMAAGFSCEIVRAEVDAGFSKEQLLDLFISSACLIPVKQSPSKKKIIIILENLEKSSLSELLRDFLAPLENRSTESPCTFQKGNGLSECYYFHENCFLMGTIAKACLQGSDLLVQQHFRWVQLRWDGEPMQGLLQRFLRRKVVNKFKGQAPSPCDPVCKIVDWALSVWRQLNSCLARLGTPEALLGPKYFLSCPVVPGHAQVTVKWMSKLWNGVIAPRVQEAILSRASVKRQPGFGQTTAKRHPSQGQQAVVKAALSILLNKAVLHGCPLPRAELDQHTADFKGGSFPLSIVSSYNTCNKKKGESGAWRKVNTSPRRKSGRFSLPTWNKPDLSTEGMKNKTISQLNCNRNASLSKQKSLENDLSLTLNLDQRLSLGSDDEADLVKELQSMCSSKSESDISKIADSRDDLRMFDSSGNNPVLSATINNLRMPVSQKEVSPLSSHQTTECSNSKSKTELGVSRVKSFLPVPRSKVTQCSQNTKRSSSSSNTRQIEINNNSKEVNWNLHKNEHLEKPNK

SEQ ID NO: 19 - protein, 761 aa, Homo sapiens
RTIVPNAPATIPLLAVAPPGVAALSIHSAVAQLPGQPVYPAAFPQMAPTDVPPSPHHTVQNMRATPPQPALPPQPTLPPQPVLPPQPTLPPQPVLPPQPTRPPQPVLPPQPMLPPQPVLPPQPALPVRPEPLQPHLPEQAAPAATPGSQILLGHPAPYAVDVAAQVPTVPVPPAAVLSPPLPEVLLPAAPELLPQFPSSLATVSASVQSVPTQTATLLPPANPPLPGGPGIASPCPTVQLTVEPVQEEQASQDKPPGLPQSCESYGGSDVTSGKELSDSCEGAFGGGRLEGRAARKHHRRSTRARSRQERASRPRLTILNVCNTGDKMVECQLETHNHKMVTFKFDLDGDAPDEIATYMVEHDFILQAERETFIEQMKDVMDKAEDMLSEDTDADRGSDPGTSPPHLSTCGLGTGEESRQSQANAPVYQQNVLHTGKRWFIICPVAEHPAPEAPESSPPLPLSSLPPEASQDSAPYKDQLSSKEQPSFLASQQLLSQAGPSNPPGAPPAPLAPSSPPVTALPQDGAAPATSTMPEPASGTASQAGGPGTPQGLTSELETSQPLAETHEAPLAVQPLVVGLAPCTPAPEAASTRDASAPREPLPPPAPEPSPHSGTPQPALGQPAPLLPAAVGAVSLATSQLPSPPLGPTVPPQPPSALESDGEGPPPRVGFVDSTIKSLDEKLRTLLYQEHVPTSSASAGTPVEVGDRDFTLEPLRGDQPRSEVCGGDLALPPVPKEAVSGRVQLPQPWWRSQNWPPLEGP

SEQ ID NO: 20 - protein, 480 aa, Homo sapiens
EEYEQDERDQKEEGNDYDTRSEASDSGSESVSFTDGSVRSGSGTDGSDEKKKERKRARGISPIVFDRSGSSASESYAGSEKKHEKLSSSVRAVRKDQTSKLKYVLQDARFFLIKSNNHENVSLAKAKGVWSTLPVNEKKLNLAFRSARSVILIFSVRESGKFQGFARLSSESHHGGSPIHWVLPAGMSAKMLGGVFKIDWICRRELPFTKSAHLTNPWNEHKPVKIGRDGQEIELECGTQLCLLFPPDESIDLYQVIHKMRHKRRMHSQPRSRGRPSRREPVRDVGRRRPEDYDIHNSRKKPRIDYPPEFHQRPGYLKDPRYQEVDRRFSGVRRDVFLNGSYNDYVREFHNMGPPPPWQGMPPYPGMEQPPHHPYYQHHAPPPQAHPPYSGHHPVPHEARYRDKRVHDYDMRVDDFLRRTQAVVSGRRSRPRERDRERERDRPRDNRRDRERDRGRDRERERERLCDRDRDRGERGRYRR

SEQ ID NO: 21 - protein, 762 aa, Homo sapiens
GAGGLYKRGSVRSLSTYSAAALQSDLEDSLYKAAGGGGPLYGDGYGFRLPPSSPQKLADVAAPPGGPPPPHSPYSGPPSRGSPVRQSFRKDSGSSSVFAESPGGKTRSAGSASTAGAPPSELFPGPGERSLVGFGPPVPAKDTETRERMEAMEKQIASLTGLVQSALLRGSEPETPSEKIEGSNGAATPSAPCGSGGRSSGATPVSGPPPPSASSTPAGQPTAVSRLQMQLHLRGLQNSASDLRGQLQQLRKLQLQNQESVRALLKRTEAELSMRVSEAARRQEDPLQRQRTLVEEERLRYLNDEELITQQLNDLEKSVEKIQRDVSHNHRLVPGPELEEKALVLKQLGETLTELKAHFPGLQSKMRVVLRVEVEAVKFLKEEPQRLDGLLKRCRGVTDTLAQIRRQVDEGVWPPPNNLLSQSPKKVTAETDFNKSVDFEMPPPSPPLNLHELSGPAEGASLTPKGGNPTKGLDTPGKRSVDKAVSVEAAERDWEEKRAALTQYSAKDINRLLEETQAELLKAIPDLDCASKAHPGPAPTPDHKPPKAPHGQKAAPRTEPSGRRGSDELTVPRYRTEKPSKSPPPPPPRRSFPSSHGLTTTRTGEVVVTSKKDSAFIKKAESEELEVQKPQVKLRRAVSEVARPASTPPIMASAIKDEDDEDRIIAELESGGGSVPPMKVVTPGASRLKAAQGQAGSPDKSKHGKQRAEYMRIQAQQQATKPSKEMSGSNETSSPVSEKPSASRTSIPVLTSFGARNSSISF

SEQ ID NO: 22 - protein, 1094 aa, Homo sapiens
RLSTWARKQTAMSQTQDYECRSHNVDLPESRIPGSNTRLEWVEIIEPRTRERMYANLVTGECVWDPPAGVRIKRTSENQWWELFDPNTSRFYYYNASTQRTVWHRPQGCDIIPLAKLQTLKQNTESPRASAESSPGRGSSVSREGSTSSSLEPEPDTEKAQELPARAGRPAAFGTVKEDSGSSSPPGVFLEKDYEIYRDYSADGQLLHYRTSSLRWNSGAKERMLIKVADREPSFLAAQGNGYAPDGPPGVRSRRPSGSQHSPSLQTFAPEADGTIFFPERRPSPFLKRAELPGSSSPLLAQPRKPSGDSQPSSPRYGYEPPLYEEPPVEYQAPIYDEPPMDVQFEAGGGYQAGSPQRSPGRKPRPFLQPNKQGPPSPCQQLVLTKQKCPERFLSLEYSPAGKEYVRQLVYVEQAGSSPKLRAGPRHKYAPNPGGGSYSLQPSPCLLRDQRLGVKSGDYSTMEGPELRHSQPPTPLPQAQEDAMSWSSQQDTLSSTGYSPGTRKRKSRKPSLCQATSATPTEGPGDLLVEQPLAEEQPPCGTSLAPVKRAEGEAEGARGAAEPFLAQARLAWEAQQAHFHMKQRSSWDSQQDGSGYESDGALPLPMPGPVVRAFSEDEALAQQENRHWRRGTFEKLGFPQILLEKSVSVQTNLASPEPYLHPSQSEDLAACAQFESSRQSRSGVPSSSCVFPTFTLRKPSSETDIENWASKHFNKHTQGLFRRKVSIANMLAWSSESIKKPMIVTSDRHVKKEACELFKLIQMYMGDRRAKADPLHVALEVATKGWSVQGLRDELYIQLCRQTTENFRLESLARGWELMAICLAFFPPTPKFHSYLEGYIYRHMDPVNDTKGVAISTYAKYCYHKLQKAALTGAKKGLKKPNVEEIRHAKNAVFSPSMFGSALQEVMGMQRERYPERQLPWVQTRLSEEVLALNGDQTEGIFRVPGDIDEVNALKLQVDQWKVPTGLEDPHVPASLLKLWYRELEEPLIPHEFYEQCIAHYDSPEAAVAVVHALPRINRMVLCYLIRFLQVFVQPANVAVTKMDVSNLAMVMAPNCLRCQSDDPRVIFENTRKEMSFLRVLIQHLDTSFMEGVL

SEQ ID NO: 23 - protein, 388 aa, Homo sapiens
AGASDKGSCVNGNRNKMHRTVQNEEERYLLHQLQLAATLKEDSIFVPGTQKGVWKLRRDLIFVFFSSHTPCGDASIIPMLEFEDQPCCPVFRNWANNSSVEASSNLEAPGNERKCEDPDSPVTKKMRLEPGNAAREVTNGAAHHQSFGKQKSGPISPGIHSCDLTVEGLATVTRIAPGSAKVIDVYRTGAKCVPGEAGDSGKPGAAFHQVGLLRVKPGRGDRTRSMSCSDKMARWNVLGCQGALLMHLLEEPIYLSAVVIGKCPYSQEAMQRALIGRCQNVSALPKGFGVQELKILQSDLLFEQSRSAVQAKRADSPGRLVPCGAAISWSAVPEQPLDVTANGFPQGTTKKTIGSLQARSQISKVELFRSFQKLLSRIARDKWPHSLR

SEQ ID NO: 24 - protein, 523 aa, Homo sapiens
MAGVSYAAPWWVSLLHRLPHFDLSWEATSSQFRPEDTDYQQALLLLGAAALACLALDLLFLLFYSFWLCCRRRKSEEHLDADCCCTAWCVIIATLVCSAGIAVGFYGNGETSDGIHRATYSLRHANRTVAGVQDRVWDTAVGLNHTAEPSLQTLERQLAGRPEPLRAVQRLQGLLETLLGYTAAIPFWRNTAVSLEVLAEQVDLYDWYRWLGYLGLLLLDVIICLLVLVGLIRSSKGILVGVCLLGVLALVISWGALGLELAVSVGSSDFCVDPDAYVTKMVEEYSVLSGDILQYYLACSPRAANPFQQKLSGSHKALVEMQDVVAELLRTVPWEQPATKDPLLRVQEVLNGTEVNLQHLTALVDCRSLHLDYVQALTGFCYDGVEGLIYLALFSFVTALMFSSIVCSVPHTWQQKRGPDEDGEEEAAPGPRQAHDSLYRVHMPSLYSCGSSYGSETSIPAAAHTVSNAPVTEYMSQNANFQNPRCENTPLIGRESPPPSYTSSMRAKYLATSQPRPDSSGSH

SEQ ID NO: 25 - protein, 1653 aa, Homo sapiens
KSTFGCLPRTSCARRDNPRASSRNRTIQRDNPRTSCAQRDNPRASSPNRTIQQENLRTSCTRQDNPRTSSPNRATRDNPRTSCAQRDNLRASSPIRATQQDNPRTCIQQNIPRSSSTQQDNPKTSCTKRDNLRPTCTQRDRTQSFSFQRDNPGTSSSQCCTQKENLRPSSPHRSTQWNNPRNSSPHRTNKDIPWASFPLRPTQSDGPRTSSPSRSKQSEVPWASIALRPTQGDRPQTSSPSRPAQHDPPQSSFGPTQYNLPSRATSSSHNPGHQSTSRTSSPVYPAAYGAPLTSPEPSQPPCAVCIGHRDAPRASSPPRYLQHDPFPFFPEPRAPESEPPHHEPPYIPPAVCIGHRDAPRASSPPRHTQFDPFPFLPDTSDAEHQCQSPQHEPLQLPAPVCIGYRDAPRASSPPRQAPEPSLLFQDLPRASTESLVPSMDSLHECPHIPTPVCIGHRDAPSFSSPPRQAPEPSLFFQDPPGTSMESLAPSTDSLHGSPVLIPQVCIGHRDAPRASSPPRHPPSDLAFLAPSPSPGSSGGSRGSAPPGETRHNLEREEYTVLADLPPPRRLAQRQPGPQAQCSSGGRTRSPGRAEVERLFGQERRKSEAAGAFQAQDEGRSQQPSQGQSQLLRRQSSPAPSRQVTMLPAKQAELTRRSQADPPHPRSPEKRPEGDRQLQGSPLPPRTSARTPERELRTQRPLESGQAGPRQPLGVWQSQEEPPGSQGPHRHLERSWSSQEGGLGPGGWWGCGEPSLGAAKAPEGAWGGTSREYKESWGQPEAWEEKPTHELPRELGKRSPLTSPPENWGGPAESSQSWHSGTPTAVGWGAEGACPYPRGSERRPELDWRDLLGLLRAPGEGVWARVPSLDWEGLLELLQARLPRKDPAGHRDDLARALGPELGPPGTNDVPEQESHSQPEGWAEATPVNGHSPALQSQSPVQLPSPACTSTQWPKIKVTRGPATATLAGLEQTGPLGSRSTAKGPSLPELQFQPEEPEESEPSRGQDPLTDQKQADSADKRPAEGKAGSPLKGRLVTSWRMPGDRPTLFNPFLLSLGVLRWRRPDLLNFKKGWMSILDEPGEPPSPSLTTTSTSQWKKHWFVLTDSSLKYYRDSTAEEADELDGEIDLRSCTDVTEYAVQRNYGFQIHTKDAVYTLSAMTSGIRRNWIEALRKTVRPTSAPDVTKLSDSNKENALHSYSTQKGPLKAGEQRAGSEVISRGGPRKADGQRQALDYVELSPLTQASPQRARTPARTPDRLAKQEELERDLAQRSEERRKWFEATDSRTPEVPAGEGPRRGLGAPLTEDQQNRLSEEIEKKWQELEKLPLRENKRVPLTALLNQSRGERRGPPSDGHEALEKEVQALRAQLEAWRLQGEAPQSALRSQEDGHIPPGYISQEACERSLAEMESSHQQVMEELQRHHERELQRLQQEKEWLLAEETAATASAIEAMKKAYQEELSRELSKTRSLQQGPDGLRKQHQSDVEALKRELQVLSEQYSQKCLEIGALMRQAEEREHTLRRCQQEGQELLRHNQELHGRLSEEIDQLRGFIASQGMGNGCGRSNERSSCELEVLLRVKENELQYLKKEVQCLRDELQMMQKDKRFTSGKYQDVYVELSHIKTRSEREIEQLKEHLRLAMAALQEKESMRNSLAE

SEQ ID NO: 26 - protein, 959 aa, Homo sapiens
TMSLSDKQTASLTAAYGQLSKGKPAECRMDSPKEISQAGFEWQRTEGKLNEIGLNVSMDGQPKDGLVKNASFLEQNKLCFFEGKLDKELSIEMQDKDCQEASGHLESRYVISETCHPLEGNSVHQKTSEFHLGLIEGPDKNKTIPVQGKVAGKNGLETKSQSDLDFPGAADIPTRYVKEQETSVWNPSFHPVAQGSLGSREATPGEMENSITPGCPVIGVVNDNSEQLKCESPLLVSLAHPAPIIEHSPTTIPPITMVFTQEHLNASCHIRDHDKELEKLSSTEEAVLNQAPQQKKAVRRALSECSHLSVPPAVNLADKYPELPAREEPSSGLLPPPSSPMPSPTPGKLGAPAMKRSMTVGEEQTASYKLSPGKLPILSTKEIPPFICEEPVAKKREELAHFSNSSSNSGKKELGTAGLYLHSKLEQIPEGSSKEKGQEDFSETRIDSCSQVCQRGEKQPGQTALAGKKEIEVTATQSTPSFLFEKPPRDGIARPEEGRPVVSGTGNDITTPPNKELPPSPEKKTKPLATTQPAKTSTSKAKTQPTSLPKQPAPTTIGGLNKKPMSLASGLVPAAPPKRPAVASARPSILPSKDVKPKPIADAKAPEKRASPSKPASAPASRSGSKSTQTVAKTTTAAAVASTGPSSRSPSTLLPKKPTAIKTEGKPAEVKKMTAKSVPADLSRPKSTSTSSMKKTTTLSGTAPAAGVVPSRVKATPMPSRPSTTPFIDKKPTSAKPSSTTPRLSRLATNTSAPDLKNVRSKVGSTENIKHQPGGGRAKVEKKTEAAATTRKPESNAVTKTAGPIASAQKQPAGKVQIVSKKVSYSHIQSKCGSKDNIKHVPGGGNVQIQNKKVDISKVSSKCGSKANIKHKPGGGDVKIESQKLNFKEKAQAKVGSLDNVGHLPAGGAVKIETYRLTFRANARARTDHGADIVSRPPHFPGGPNSGSRVLGPLSRAVH

SEQ ID NO: 27 - protein, 878 aa, Homo sapiens
MSASTSGSGPEPKPQPQPVPEPERGPLSEQVSEAVSEAVPRSEPVSETTSEPEPGAGQPSELLQGSRPGSESSSGVGAGPFTKAASEPLSRAVGSATFLRPESGSLPALKPLPLLRPGQAKTPLGVPMSGTGTTSSAPLALLPLDSFEGWLLKWTNYLKGYQRRWFVLGNGLLSYYRNQGEMAHTCRGTINLSTAHIDTEDSCGILLTSGARSYHLKASSEVDRQQWITALELAKAKAVRVMNTHSDDSGDDDEATTPADKSELHHTLKNLSLKLDDLSTCNDLIAKHGAALQRSLTELDGLKIPSESGEKLKVVNERATLFRITSNAMINACRDFLELAEIHSRKWQRALQYEQEQRVHLEETIEQLAKQHNSLERAFHSAPGRPANPSKSFIEGSLLTPKGEDSEEDEDTEYFDAMEDSTSFITVITEAKEDSRKAEGSTGTSSVDWSSADNVLDGASLVPKGSSKVKRRVRIPNKPNYSLNLWSIMKNCIGRELSRIPMPVNFNEPLSMLQRLTEDLEYHHLLDKAVHCTSSVEQMCLVAAFSVSSYSTTVHRIAKPFNPMLGETFELDRLDDMGLRSLCEQVSHHPPSAAHYVFSKHGWSLWQEITISSKFRGKYISIMPLGAIHLEFQASGNHYVWRKSTSTVHNIIVGKLWIDQSGDIEIVNHKTNDRCQLKFLPYSYFSKEAARKVTGVVSDSQGKAHYVLSGSWDEQMECSKVMHSSPSSPSSDGKQKTVYQTLSAKLLWKKYPLPENAENMYYFSELALTLNEHEEGVAPTDSRLRPDQRLMEKGRWDEANTEKQRLEEKQRLSRRRRLEACGPGSSCSSEEEKEADAYTPLWFEKRLDPLTGEMACVYKGGYWEAKEKQDWHMCPNIF

SEQ ID NO: 28 - protein, 281 aa, Homo sapiens
IGGYYWHPLSEVHIWDPLTNVWIQGAEIPDYTRESYGVTCLGPNIYVTGGYRTDNIEALDTVWIYNSESDEWTEGLPMLNARYYHCAVTLGGCVYALGGYRKGAPAEEAEFYDPLKEKWIPIANMIKGVGNATACVLHDVIYVIGGHCGYRGSCTYDKVQSYNSDINEWSLITSSPHPEYGLCSVPFENKLYLVGGQTTITECYDPEQNEWREIAPMMERRMECGAVIMNGCIYVTGGYSYSKGTYLQSIEKYDPDLNKWEIVGNLPSAMRSHGCVCVYNV

SEQ ID NO: 29 - protein, 707 aa, Homo sapiens
PSDRLMWHLRQTSDGLLSFSPHFCIQETAWTIIQHNGSDLTRVRNTNPENPYAGFFEYVASMEQLQATINRAEHCEQEFTYYCKKSRLVNKQDGTPLSWWVGRTNETQTYWGGSSPDLQKCTCGLEGNCIDSQYYCNCDADRNEWTNDTGLLAYKEHLPVTKIVITDTGRLHSEAAYKLGPLLCRGDRSFWNSASFDTEASYLHFPTFHGELSADVSFFFKTTASSGVFLENLGIADFIRIELRSPTVVTFSFDVGNGPFEISVQSPTHFNDNQWHHVRVERNMKEASLQVDQLTPKTQPAPADGHVLLQLNSQLFVGGTATRQRGFLGCIRSLQLNGMTLDLEERAQVTPEVQPGCRGHCSSYGKLCRNGGKCRERPIGFFCDCTFSAYTGPFCSNEISAYFGSGSSVIYNFQENYLLSKNSSSHAASFHGDMKLSREMIKFSFRTTRTPSLLLFVSSFYKEYLSVIIAKNGSLQIRYKLNKYQEPDVVNFDFKNMADGQLHHIMINREEGVVFIEIDDNRRRQVHLSSGTEFSAVKSLVLGRILEHSDVDQETALAGAQGFTGCLSAVQLSHVAPLKAALHPSHPDPVTVTGHVTESSCMAQPGTDATSRERTHSFADHSGTIDDREPLANAIKSDSAVIGGLIAVVIFILLCITAIAVRIYQQKRLYKRSEAKRSENVDSAEAVLKSELNIQNAVNENQKEYFF

SEQ ID NO: 30 - protein, 341 aa, Homo sapiens
SQEQTEELSVDISRTWGDGRTRGPVCPDPARGRGGAPRWLRCRMLLAFGSHGCPGPHWLCLPAPHGAGAHGTSQGSVCEWGGPGRWGPVAPALQAMRTPSRNESGLELLTAYYNQLCFLDARFLTPARSLGLFFHWYDSLTGVPAQQRALAFEKGSVLFNIGALHTQIGARQDRSCTEGARRAMEAFQRAAGAFSLLRENFSHAPSPDMSAASLCALEQLMMAQAQECVFEGLSPPASMAPQDCLAQLRLAQEAAQVSSGTRVRMQGVGPSWGQSPGPGMRELSHLLPCVSAPSQLLSCSLGGLVRNLGTRASASRGWHKAAGTEVPGRLLGWWSEQVEAG

SEQ ID NO: 31 - protein, 531 aa, Homo sapiens
EAKRKLRILQRELQNVQVNQKVGMFEAHIQAQSSAIQAPRSPRLGRAHSPSPCPFRSSSQPPGRVLVQGARSEERRTKSWGEQCPETSGTDSGRKGGPSLCSSQVKKGMPPLPGRAAPTGSEAQGPSAFVRMEKGIPASPRCGSPTAMEIDKRGSPTPGTRSCLAPSLGLFGASLTMATEVAARVTSTGPHRPQDLALTEPSGRARELEDLQPPEALVERQGQFLGSETSPAPERGGPRDGEPPGKMGKGYLPCGMPGSGEPEVGKRPEETTVSVQSAESSDALSWSRLPRALASVGPEEARSGAPVGGGRWQLSDRVEGGSPTLGLLGGSPSAQPGTGNVEAGIPSGRMLEPLPCWDAAKDLKEPQCPPGDRVGVQPGNSRVWQGTMEKAGLAWTRGTGVQSEGTWESQRQDSDALPSPELLPQDQDKPFLRKACSPSNIPAVIITDMGTQEDGALEETQGSPRGNLPLRKLSSSSASSTGFSSSYEDSEEDISSDPERTLDPNSAFLHTLDQQKPRVVSLALRFAQNSC

SEQ ID NO: 32 - protein, 1199 aa, Homo sapiens
FRLVVKTALKLLLVFVEYSESNAPLLIQAVTAVDTKRGVKPWSNIMEILEEKDGVDTELLVYAMTLVNKTLSGLPDQDTFYDVVDCLEELGIAAVSQRHLNKKGTDLDLVEQLNIYEVALRHEDGDETTEPPPSGCRDRRRASVCSSGGGEHRGLDRRRSRRHSVQSIKSTLSAPTSPCSQSAPSFKPNQVRDLREKSSPSGLLTSSFRQHQESLAAERERRRQEREERLQRIEREERNKFSRDYLDKREEQRQAREERYKYLEQLAAEEHEKELRSRSVSRGRADLSLDLTSPAAPACLAPLSHSPSSSDSQEALTVSASSPGTPHHPQASAGDPEPESEAEPEAEAGAGQVADEAGQDIASAHEGAETEVEQALEQEPEERASLSEKERQNEGVNERDNCSASSVSSSSSTLEREEKEDKLSRDRTTGLWPAGVQDAGVNGQCGDILTNKRFMLDMLYAHNRKSPDDEEKGDGEAGRTQQEAEAVASLATRISTLQANSQTQDESVRRVDVGCLDNRGSVKAFAEKFNSGDLGRGSISPDAEPNDKVPETAPVQPKTESDYIWDQLMANPRELRIQDMDFTDLGEEDDIDVLDVDLGHREAPGPPPPPPPTFLGLPPPPPPPLLDSIPPPPVPGNLLVPPPPVFNAPQGLGWSQVPRGQPTFTKKKKTIRLFWNEVRPFDWPCKNNRRCREFLWSKLEPIKVDTSRLEHLFESKSKELSVSKKTAADGKRQEIIVLDSKRSNAINIGLTVLPPPRTIKIAILNFDEYALNKEGIEKILTMIPTDEEKQKIQEAQLANPEIPLGSAEQFLLTLSSISELSARLHLWAFKMDYETTEKEVAEPLLDLKEGIDQLENNKTLGFILSTLLAIGNFLNGTNAKAFELSYLEKVPEVKDTVHKQSLLHHVCTMVVENFPDSSDLYSEIGAITRSAKVDFDQLQDNLCQMERRCKASWDHLKAIAKHEMKPVLKQRMSEFLKDCAERIIILKIVHRRIINRFHSFLLFMGHPPYAIREVNINKFCRIISEFALEYRTTRERVLQQKQKRANHRERNKTRGKMITDSGKFSGSSPAPPSQPQGLSYAEDAAEHENMKAVLKTSSPSVEDATPALGVRTRSRASRGSTSSWTMGTDDSPNVTDDAADEIMDRIVKSATQVPSQRVVPRERKRSRANRKSLRRTLKSGLTPEEARALGLVGTSELQL

SEQ ID NO: 33 - protein, 449 aa, Homo sapiens
SRLFSKALKGDHRCGETETPKSCSEVAGCKAAMRHQGKIPEELSLDDRARTQKKWGRGKWEPEPSSKPPREATLEERHARGEKHLGVEIEKTSGEIIRCEKCKRERELQQSLERERLSLGTSELDMGKGPMYDVEKLVRTRSCRRSPEANPASGEEGWKGDSHRSSPRNPTQELRRPSKSMDKKEDRGPEDQESHAQGAAKAKKDLVEVLPVTEEGLREVKKDTRPMSRSKHGGWLLREHQAGFEKLRRTRGEEKEAEKEKKPCMSGGRRMTLRDDQPAKLEKEPKTRPEENKPERPSGRKPRPMGIIAANVEKHYETGRVIGDGNFAVVKECRHRETRQAYAMKIIDKSRLKGKEDMVDSEILIIQSLSHPNIVKLHEVYETDMEIYLILEYVQGGDLFDAIIESVKFPEPDAALMIMDLCKALVHMHDKSIVHRDLKPENLLLLKIW

SEQ ID NO: 34 - protein, 1354 aa, Homo sapiens
PDLVMTVMEAISILLNAKPDWPSAKQLLGDSNFLKRLLEYDKENIKPQILAKLQKYINNPDFVPEKVEKVSKACKSMCMWVRAMDLYSRVVKVVEPKRQKLRAAQAELDITMATLREKQALLRQVEDQIQALQDEYDKGVNEKESLAKTMALTKARLVRAGKLTAALEDEQVRWEESIQKFEEEISNITGNVFIAAACVAYYGAFTAQYRQSLIECWIQDCQSLEIPIDPSFSLINILGDPYEIRQWNTDGLPRDLISTENGILVTQGRRWPLMIDPQDQANRWIRNKESKSGLKIIKLTDSNFLRILENSIRLGLPVLLEELKETLDPALEPILLKQIFISGGRLLIRLGDSDIDYDKNFRFYMTTKMPNPHYLPEVCIKVTIINFTVTKSGLEDQLLSDVVRLEKPRLEEQRIKLIVRINTDKNQLKTIEEKILRMLFTSEGNILDNEELIDTLQDSKITSGAIKTRLEEAESTEQMINVAREKYRPVATQGSVMYFVIASLSEIDPMYQYSLKYFKQLFNTTIETSVKTENLQQRLDVLLEQTLLTAYVNVSRGLFEQHKLIYSFMLCVEMMRQQGTLSDAEWNFFLRGSAGLEKERPPKPEAPWLPTATWFACCDLEESFPVFHGLTQNILSHPISIRLGSFETYINPQKWEGYSKMKHEDKHMRQEKEAAHQDPWSAGLSSFHKLILIKCCKEEKVVFALTDFVIENLGKQFIETPPVDLPTLYQDMSCNTPLVFILSTGSDPMGAFQRFARESGYSERVQSISLGQGQGPIAEKMVKDAMKSGNWVFLQNCHLAVSWMLAMEELIKTFTDPDSAIKDTFRLFLSSMPSNTFPVTVLQNSVKVTNEPPKGLRANIRRAFTEMTPSFFEENILGKKWRQIIFGICFFHAIIQERKKFGPLGWNICYEFNDSDRECALLNLKLYCKEGKIPWDALIYITGEITYGGRVTDSWDQRCLRTILKRFFSPETLEEDYKYSESGIYFAPMADSLQEFKDYIENLPLIDDPEIFGMHENANLVFQYKETSTLINTILEVQPRSSTGGEGKSNDEIVQELVASVQTRVPEKLEMEGASESLFVKDLQGRLNSLTTVLGQEVDRFNNLLKLIHTSLETLNKAIAGFVVMSEEMEKVYNSFLNNQVPALWSNTAYPSLKPLGSWVKDLILRTSFVDLWLKRGQPKSYWISGFFFPQGFLTGTLQNHARKYNLPIDELSFKYSVIPTYRDQAAVIEAAKTVQFGQELPMDMELPSPEDGVLVHGMFMDASRWDDKEMVIEDALPGQMNPVLPVVHFEPQQNYKPSPTLYHCPLYKTGARAGTLSTTGHSTNFVVTVLLPSKRSKDYWIAKGSALLCQLSE

SEQ ID NO: 35 - protein, 966 aa, Homo sapiens
KYRSTVSKSKDPSGLLISVIRTLSTSDDVEDRENEKGRLEEAYEKCDRDLDELIVQHYTELTTAIRTYQSITERITNSRNKIKQVKENLLSCKMLLHCKRDELRKLWIEGIEHKHVLNLLDEIENIKQVPQKLEQCMASKHYLSATDMLVSAVESLEGPLLQVEGLSDLRLELHSKKMNLHLVLIDELHRHLYIKSTSRVVQRNKEKGKISSLVKDASVPLIDVTNLPTPRKFLDTSHYSTAGSSSVREINLQDIKEDLELDPEENSTLFMGILIKGLAKLKKIPETVKAIIERLEQELKQIVKRSTTQVADSGYQRGENVTVENQPRLLLELLELLFDKFNAVAAAHSVVLGYLQDTVVTPLTQQEDIKLYDMADVWVKIQDVLQMLLTEYLDMKNTRTASEPSAQLSYASTGREFAAFFAKKKPQRPKNSLFKFESSSHAISMSAYLREQRRELYSRSGELQGGPDDNLIEGGGTKFVCKPGARNITVIFHPLLRFIQEIEHALGLGPAKQCPLREFLTVYIKNIFLNQVLAEINKEIEGVTKTSDPLKILANADTMKVLGVQRPLLQSTIIVEKTVQDLLNLMHDLSAYSDQFLNMVCVKLQEYKDTCTAAYRGIVQSEEKLVISASWAKDDDISRLLKSLPNWMNMAQPKQLRPKREEEEDFIRAAFGKESEVLIGNLGDKLIPPQDILRDVSDLKALANMHESLEWLASRTKSAFSNLSTSQMLSPAQDSHTNTDLPPVSEQIMQTLSELAKSFQDMADRCLLVLHLEVRVHCFHYLIPLAKEGNYAIVANVESMDYDPLVVKLNKDISAIEEAMSASLQQHKFQYIFEGLGHLISCILINGAQYFRRISESGIKKMCRNIFVLQQNLTNITMSREADLDFARQYYEMLYNTADELLNLVVDQGVKYTELEYIHALTLLHRSQTGVGELTTQNTRLQRLKEIICEQAAIKQATKDKKITTV

SEQ ID NO: 36 - protein, 1766 aa, Homo sapiens
SKSVWFNSACRSVCSQKPGACLGLIYTVYVDSLNVSLESLIANLCACLVPAAGGSQKLFSLGAGDRQLIQTPLHDSLPITGTSVALLFQQLGIQNVLSLFCAVLTENKVLFHSASFQRLSDACRALESLMFPLKYSYPYIPILPAQLLEVLSSPTPFIIGVHSVFKTDVHELLDVIIADLDGGTIKIPECIHLSSLPEPLLHQTQSALSLILHPDLEVADHAFPPPRTALSHSKMLDKEVRAVFLRLFAQLFQGYRSCLQLIRIHAEPVIHFHKTAFLGQRGLVENDFLTKVLSGMAFAGFVSERGPPYRSCDLFDELVAFEVERIKVEENNPVKMIKHVRELAEQLFKNENPNPHMAFQKVPRPTEGSHLRVHILPFPEINEARVQELIQENVAKNQNAPPATRIEKKCVVPAGPPVVSIMDKVTTVFNSAQRLEVVRNCISFIFENKILETEKTLPAALRALKGKAARQCLTDELGLHVQQNRAILDHQQFDYIIRMMNCTLQDCSSLEEYNIAAALLPLTSAFYRKLAPGVSQFAYTCVQDHPIWTNQQFWETTFYNAVQEQVRSLYLSAKEDNHAPHLKQKDKLPDDHYQEKTAMDLAAEQLRLWPTLSKSTQQELVQHEESTVFSQAIHFANLMVNLLVPLDTSKNKLLRTSAPGDWESGSNSIVTNSIAGSVAESYDTESGFEDSENTDIANSVVRFITRFIDKVCTESGVTQDHIKSLHCMIPGIVAMHIETLEAVHRESRRLPPIQKPKILRPALLPGEEIVCEGLRVLLDPDGREEATGGLLGGPQLLPAEGALFLTTYRILFRGTPHDQLVGEQTVVRSFPIASITKEKKITMQNQLQQNMQEGLQITSASFQLIKVAFDEEVSPEVVEIFKKQLMKFRYPQSIFSTFAFAAGQTTPQIILPKQKEKNTSFRTFSKTIVKGAKRAGKMTIGRQYLLKKKTGTIVEERVNRPGWNEDDDVSVSDESELPTSTTLKASEKSTMEQLVEKACFRDYQRLGLGTISGSSSRSRPEYFRITASNRMYSLCRSYPGLLVVPQAVQDSSLPRVARCYRHNRLPVVCWKNSRSGTLLLRSGGFHGKGVVGLFKSQNSPQAAPTSSLESSSSIEQEKYLQALLNAVSVHQKLRGNSTLTVRPAFALSPGTERRTSRMSTVLKQVVPGHLDVNPSNSFAQGGVWASLRSSTRLISSPTSFIDVGARLAGKDHSASFSNSSYLQNQLLKRQAALYIFGEKSQLRNFKVEFALNCEFVPVEFHEIRQVKASFKKLMRACIPSTIPTDSEVTFLKALGDSEWFPQLHRIMQLAVVVSEVLENGSSVLVCLEEGWDITAQVTSLVQLLSDPFYRTLEGFQMLVEKEWLSFGHKFSQRSSLTLNCQGSGFAPVFLQFLDCVHQVHNQYPTEFEFNLYYLKFLAFHYVSNRFKTFLLDSDYERLEHGTLFDDKGEKHAKKGVCIWECIDRMHKRSPIFFNYLYSPLEIEALKPNVNVSSLKKWDYYIEETLSTGPSYDWMMLTPKHFPSEDSDLAGEAGPRSQRRTVWPCYDDVSCTQPDALTSLFSEIEKLEHKLNQAPEKWQQLWERVTVDLKEEPRTDRSQRHLSRSPGIVSTNLPSYQKRSLLHLPDSSMGEEQNSSISPSNGVERRAATLYSQYTSKNDENRSFEGTLYKRGALLKGWKPRWFVLDVTKHQLRYYDSGEDTSCKGHIDLAEVEMVIPAGPSMGAPKHTSDKAFFDLKTSKRVYNFCAQDGQSAQQWMDKIQSCISDA

SEQ ID NO: 37 - protein, 498 aa, Homo sapiens
NYNFSTASSSGTRLHRGYVEEATLEDKPSQTTHIVFVVHGIGQKMDQGRIIKNTAMMREAARKIEERHFSNHATHVEFLPVEWRSKLTLDGDTVDSITPDKVRGLRDMLNSSAMDIMYYTSPLYRDELVKGLQQELNRLYSLFCSRNPDFEEKGGKVSIVSHSLGCVITYDIMTGWNPVRLYEQLLQKEEELPDERWMSYEERHLLDELYITKRRLKEIEERLHGLKASSMTQTPALKFKVENFFCMGSPLAVFLALRGIRPGNTGSQDHILPREICNRLLNIFHPTDPVAYRLEPLILKHYSNISPVQIHWYNTSNPLPYEHMKPSFLNPAKEPTSVSENEGISTIPSPVTSPVLSRRHYGESITNIGKASILGAASIGKGLGGMLFSRFGRSSTTQSSETSKDSMEDEKKPVASPSATTVGTQTLPHSSSGFLDSALELDHRIDFELREGLVESRYWSAVTSHTAYWSSLDVALFLLTFMYKHEHDDDAKPNLDPI

SEQ ID NO: 38 - protein, 389 aa, Homo sapiens [sequence omitted]

SEQ ID NO: 39 - protein, 380 aa, Homo sapiens
RPLPGYPDAEAPEPSSAGAQAAEEPSGAGSEELIKSDQVNGVLVLSLLDKIIGAVDQIQLTQAQLEERQAEMEGAVQSIQGELSKLGKAHATTSNTVSKLLEKVRKVSVNVKTVRGSLERQAGQIKKLEVNEAELLRRRNFKVMIYQDEVKLPAKLSISKSLKESEALPEKEGEELGEGERPEEDAAALELSSDEAVEVEEVIEESRAERIKRSGLRRVDDFKKAFSKEKMEKTKVRTRENLEKTRLKTKENLEKTRHTLEKRMNKLGTRLVPAERREKLKTSRDKLRKSFTPDHVVYARSKTAVYKVPPFTFHVKKIREGQVEVLKATEMVEVGADDDEGGAERGEAGDLRRGSSPDVHALLEITEESDAVLVDKSDSD

SEQ ID NO: 40 - protein, 360 aa, Homo sapiens
AVCVIDMSSFTKFEITSTGDQALEVLQYLFSNDLDVPVGHIVHTGMLNEGGGYENDCSIARLNKRSFFMISPTDQQVHCWAWLKKHMPKDSNLLLEDVTWKYTALNLIGPRAVDVLSELSYAPMTPDHFPSLFCKEMSVGYANGIRVMSMTHTGEPGFMLYIPIEYALHVYNEVMSVGQKYGIRNAGYYALRSLRIEKFFAFWGQDINNLTTPLECGRESRVKLEKGMDFIGRDALLQQKQNGVYKRLTMFILDDHDSDLDLWPWWGEPIYRNGQYVGKTTSSAYSYSLERHVCLGFVHNFSEDTGEEQVVTADFINRGEYEIDIAGYRFQAKAKLYPVASLFTQKRRKDDMELSDLHGK

SEQ ID NO: 41 - protein, 832 aa, Homo sapiens
GGHPGMPGGMGTPGEPGPQGPPGSRGPPGMRGAKGRRGPRGPDGPAGEQGSRGLKGPPGPQGRPGRPGQQGVAGERGHLGSRGFPGIPGPSGPPGTKGLPGEPGPQGPQGPIGPPGEMGPKGPPGAVGEPGLPGEAGMKGDLGPLGTPGEQGLIGQRGEPGLEGDSGPMGPDGLKGDRGDPGPDGEHGEKGQEGLMGEDGPPGPPGVTGVRGPEGKSGKQGEKGRTGAKGAKGYQGQLGEMGVPGDPGPPGTPGPKGSRGSLGPTGAPGRMGAQGEPGLAGYDGHKGIVGPLGPPGPKGEKGEQGEDGKAEGPPGPPGDRGPVGDRGDRGEPGDPGYPGQEGVQGLRGKPGQQGQPGHPGPRGWPGPKGSKGAEGPKGKQGKAGAPGRRGVQGLQGLPGPRGVVGRQGLEGIAGPDGLPGRDGQAGQQGEQGDDGDPGPMGPAGKRGNPGVAGLPGAQGPPGFKGESGLPGQLGPPGKRGTEGRTGLPGNQGEPGSKGQPGDSGEMGFPGMAGLFGPKGPPGDIGFKGIQGPRGPPGLMGKEGIVGPLGILGPSGLPGPKGDKGSRGDWGLQGPRGPPGPRGRPGPPGPPGGPIQLQQDDLGAAFQTWMDTSGALRPESYSYPDRLVLDQGGEIFKTLHYLSNLIQSIKTPLGTKENPARVCRDLMDCEQKMVDGTYWVDPNLGCSSDTIEVSCNFTHGGQTCLKPITASKVEFAISRVQMNFLHLLSSEVTQHITIHCLNMTVWQEGTGQTPAKQAVRFRAWNGQIFEAGGQFRPEVSMDGCKVQDGRWHQTLFTFRTQDPQQLPIISVDNLPPASSGKQYRLEVGPACFL

SEQ ID NO: 42 - protein, 370 aa, Homo sapiens
WRSPFLFKRHGTLFVAGQTGAGNNWAKGHYTEGAELVDAVLDVVRKECEHCDCLQGFQLTHSLGGGTGSGMGTLLISKIREEFPDRIMNTFSVMPSPKVSDTVVEPYNATLSVHQLVENTDETYCIDNEALYDICFRTLKLTTPTYGDLNHLVSATMSGVTTSLRFPGQLNADLRKLAVNMVPFPRLHFFMPGFAPLTSRGSQQYRALTVPELTQQMFDARNMMAACDPRHGRYLTVATVFRGPMSMKEVDEQMLAIQSKNSSYFVEWIPNNVKVAVCDIPPRGLKMASTFIGNSTAIQELFKRISEQFSAMFRRKAFLHWFTGEGMDEMEFTEAESNMNDLVSEYQQYQDATANDGEEAFEDEEEEIDG

SEQ ID NO: 43 - protein, 412 aa, Homo sapiens
GPLGGGRAGKMVCARAALGPGALWAAAWGVLLLTAPAGAQRGRKKVVHVLEGESGSVVVQTAPGQVVSHRGGTIVLPCRYHYEAAAHGHDGVRLKWTKVVDPLAFTDVFVALGPQHRAFGSYRGRAELQGDGPGDASLVLRNVTLQDYGRYECEVTNELEDDAGMVKLDLEGVVFPYHPRGGRYKLTFAEAQRACAEQDGILASAEQLHAAWRDGLDWCNAGWLRDGSVQYPVNRPREPCGGLGGTGSAGGGGDANGGLRNYGYRHNAEERYDAFCFTSNLPGRVFFLKPLRPVPFSGAARACAARGAAVAKVGQLFAAWKLQLLDRCTAGWLADGSARYPIVNPRARCGGRRPGVRSLGFPDATRRLFGVYCYRAPGAPDPAPGGWGWGWAGGGGWAGGARDPAAWTPLHV

SEQ ID NO: 44 - protein, 803 aa, Homo sapiens
DIRIRVAIPLDYETVDRYDFDLFANESVPDHVGYAKVKITLINENDNRPIFSQPLYNISLYENVTVGTSVLTVLATDNDAGTFGEVNYFFSDDPDRFSLDKDTGLIMLIARLDYELIQRFTLTIIARDGGGEETTGRVRINVLDVNDNVPTFQKDAYVGALRENEPSVTQLVRLRATDEDSPPNNQITYSIVSASAFGSYFDISLYEGYGVISVSRPLDYEQISNGLIYLTVMAMDAGNPPLNSTVPVTIEVFDENDNPPTFSKPAYFVSVVENIMAGATVLFLNATDLDRSREYGQESIIYSLEGSTQFRINARSGEITTTSLLDRETKSEYILIVRAVDGGVGHNQKTGIATVNITLLDINDNHPTWKDAPYYINLVEMTPPDSDVTTVVAVDPDLGENGTLVYSIQPPNKFYSLNSTTGKIRTTHAMLDRENPDPHEAELMRKIVVSVTDCGRPPLKATSSATVFVNLLDLNDNDPTFQNLPFVAEVLEGIPAGVSIYQVVAIDLDEGLNGLVSYRMPVGMPRMDFLINSSSGVVVTTTELDRERIAEYQLRVVASDAGTPTKSSTSTLTIHVLDVNDETPTFFPAVYNVSVSEDVPREFRVVWLNCTDNDVGLNAELSYFITGGNVDGKFSVGYRDAVVRTVVGLDRETTAAYMLILEAIDNGPVGKRHTGTATVFVTVLDVNDNRPIFLQSSYEASVPEDIPEGHSILQEEDLASPCISPAPPRRAFQSSGEKETSQFPGKELRREPGPSKAQNRAAFTEPLAEAPLLGSKQAQEERAPLPREQAQQLQGSEGEKGGP

SEQ ID NO: 45 - protein, 1036 aa, Homo sapiens
MASSVGNVADSTGLAELAHREYQAGDFEAAERHCMQLWRQEPDNTGVLLLLSSIHFQCRRLDRSAHFSTLAIKQNPLLAEAYSNLGNVYKERGQLQEAIEHYRHALRLKPDFIDGYINLAAALVAAGDMEGAVQAYVSALQYNPDLYCVRSDLGNLLKALGRLEEAKACYLKAIETQPNFAVAWSNLGCVFNAQGEIWLAIHHFEKAVTLDPNFLDAYINLGNVLKEARIFDRAVAAYLRALSLSPNHAVVHGNLACVYYEQGLIDLAIDTYRRAIELQPHFPDAYCNLANALKEKGSVAEAEDCYNTALRLCPTHADSLNNLANIKREQGNIEEAVRLYRKALEVFPEFAAAHSNLASVLQQQGKLQEALMHYKEAIRISPTFADAYSNMGNTLKEMQDVQGALQCYTRAIQINPAFADAHSNLASIHKDSGNIPEAIASYRTALKLKPDFPDAYCNLAHCLQIVCDWTDYDERMKKLVSIVADQLEKNRLPSVHPHHSMLYPLSHGFRKAIAERHGNLCLDKINVLHKPPYEHPKDLKLSDGRLRVGYVSSDFGNHPTSHLMQSIPGMHNPDKFEVFCYALSPDDGTNFRVKVMAEANHFIDLSQIPCNGKAADRIHQDGIHILVNMNGYTKGARNELFALRPAPIQAMWLGYPGTSGALFMDYIITDQETSPAEVAEQYSEKLAYMPHTFFIGDHANMFPHLKKKAVIDFKSNGHIYDNRIVLNGIDLKAFLDSLPDVKIVKMKCPDGGDNADSSNTALNMPVIPMNTIAEAVIEMINRGQIQITINGFSISNGLATTQINNKAATGEEVPRTIIVTTRSQYGLPEDAIVYCNFNQLYKIDPSTLQMWANILKRVPNSVLWLLRFPAVGEPNIQQYAQNMGLPQNRIIFSPVAPKEEHVRRGQLADVCLDTPLCNGHTTGMDVLWAGTPMVTMPGETLASRVAASQLTCLGCLELIAKNRQEYEDIAVKLGTDLEYLKKVRGKVWKQRISSPLFNTKQYTMELERLYLQMWEHYAAGNKPDHMIKPVEVTESA

SEQ ID NO: 46 - protein, 277 aa, Homo sapiens
PWSYSAPSAPRSLVGSALPRVETLPPVVGSTRSSVGIKAWANAYRTDLPMEICGYIKLCLLSFFCLCFHIDNKKSQASVSDPMNALQSLTGGPAAGAAGIGMPPRGPGQSLGGMGSLGAMGQPMSLSGQPPPGTSGMAPHSMAVVSTATPQTQLQLQQVALQQQQQQQQFQQQQQAALQQQQQQQQQQQFQAQQSAMQQQFQAVVQQQQQLQQQQQQQQHLIKLHHQNQQQVRAPMVVQQPPVQPQVQQQQTAVQTAQAAQMVAPGVQVRAWGWRAP

SEQ ID NO: 47 - protein, 1115 aa, Homo sapiens
EAACQLRAPRLSARSGSCQLSAHAPPLQLRGAPGWAAGRRDCNLTLPHCCCWQNTYTNADKLLEAAEQLAQTGECDPEEIYKAARHLEVRIQDFVRRVEQRKLLLDMSVSFHTHTKELWTWMEDLQKEMLEDVCADSVDAVQELIKQFQQQQTATLDATLNVIKEGEDLIQQLRDSAVSNNKTPHSSSISHIESVLQQLDDAQVQMEELFHERKIKLDIFLQLRIFEQYTIEVTAELDAWNEDLLRQMNDFNTEDLTLAEQRLQRHTERKLAMNNMTFEVIQQGQDLHQYITEVQASGIELICEKDIDLAAQVQELLEFLHEKQHELELNAEQTHKRLEQCLQLRHLQAEVKQVLGWIRNGESMLNASLVNASSLSEAEQLQREHEQFQLAIESLFHATSLQKTHQSALQVQQKAEVLLQAGHYDADAIRECAEKVALHWQQLMLKMEDRLKLVNASVAFYKTSEQVCSVLESLEQEYRRDEDWCGGRDKLGPAAEIDHVIPLISKHLEQKEAFLKACTLARRNAEVFLKYIHRNNVSMPSVASHTRGPEQQVKAILSELLQRENRVLHFWTLKKRRLDQCQQYVVFERSAKQALDWIQETGEFYLSTHTSTGETTEETQELLKEYGEFRVPAKQTKEKVKLLIQLADSFVEKGHIHATEIRKWVTTVDKHYRDFSLRMGKYRYSLEKALGVNTEDNKDLELDIIPASLSDREVKLRDANHEVNEEKRKSARKKEFIMAELLQTEKAYVRDLHECLETYLWEMTSGVEEIPPGILNKEHIIFGNIQEIYDFHNNIFLKELEKYEQLPEDVGHCFVTWADKFQMYVTYCKNKPDSNQLILEHAGTFFDEIQQRHGLANSISSYLIKPVQRITKYQLLLKELLTCCEEGKGELKDGLEVMLSVPKKANDAMHVSMLEGFDENLDVQGELILQDAFQVWDPKSLIRKGRERHLFLFEISLVFSKEIKDSSGHTKYVYKNKLLTSELGVTEHVEGDPCKFALWSGRTPSSDNKTVLKASNIETKQEWIKNIREVIQERIIHLKGALKEPLQLPKTPAKQRNNSKRDGVEDIDSQGDGSSQPDTISIASRTSQNTVDSDKDGNLVPRWHLGPGDPFSTYV

SEQ ID NO: 48 - protein, 783 aa, Homo sapiens
QRQITQECELVETSNSEDRLLKHWVSPLKDAMRHLPSQESGIREMHIIPQKAIVGEIGHGCNEGEKILSAGESSHRYEVSGQNFKQKSGLTEHQKIHNINKTYECKECEKTFNRSSNLIIHQRIHTGNKPYVCNECGKDSNQSSNLIIHQRIHTGKKPYICHECGKDFNQSSNLVRHKQIHSGGNPYECKECGKAFKGSSNLVLHQRIHSRGKPYLCNKCGKAFSQSTDLIIHHRIHTGEKPYECYDCGQMFSQSSHLVPHQRIHTGEKPLKCNECEKAFRQHSHLTEHQRLHSGEKPYECHRCGKTFSGRTAFLKHQRLHAGEKIEECEKTFSKDEELREEQRIHQEEKAYWCNQCGRNFQGTSDLIRHQVTHTGEKPYECKECGKTFNQSSDLLRHHRIHSGEKPCVCSKCGKSFRGSSDLIRHHRVHTGEKPYECSECGKAFSQRSHLVTHQKIHTGEKPYQCTECGKAFRRRSLLIQHRRIHSGEKPYECKECGKLFIWRTAFLKHQSLHTGEKLECEKTFSQDEELRGEQKIHQEAKAYWCNQCGRAFQGSSDLIRHQVTHTREKPYECKECGKTFNQSSDLLRHHRIHSGEKPYVCNKCGKSFRGSSDLIKHHRIHTGEKPYECSECGKAFSQRSHLATHQKIHTGEKPYQCSECGNAFRRRSLLIQHRRLHSGEKPYECKECGKLFMWHTAFLKHQRLHAGEKLEECEKTFSKDEELRKEQRTHQEKKVYWCNQCSRTFQGSSDLIRHQVTHTREKPYECKECGKTQSELRPSETS

SEQ ID NO: 49 - protein, 797 aa, Homo sapiens
GAFSASLFAPSKPQRRKSPLVKQLQVEDAQERAALAVGSPGPGGGSFAREPSPTHRGPRPGGLDYGAGDGPGLAFGGPGPAKDRRLEERRRSTVFLSVGAIEGSAPGADLPSLQPSRSIDERLLGTGPTAGRDLLLPSPVSALKPLVSGPSLGPSGSTFIHPLTGKPLDPSSPLALALAARERALASQAPSRSPTPVHSPDADRPGPLFVDVQARDPERGSLASPAFSPRSPAWIPVPARREAEKVPREERKSPEDKKSMILSVLDTSLQRPAGLIVVHATSNGQEPSRLGGAEEERPGTPELAPAPMQSAAVAEPLPSPRAQPPGGTPADAGPGQGSSEEEPELVFAVNLPPAQLSSSDEETREELARIGLVPPPEEFANGVLLATPLAGPGPSPTTVPSPASGKPSSEPPPAPESAADSGVEEADTRSSSDPHLETTSTISTVSSMSTLSSESGELTDTHTSFADGHTFLLEKPPVPPKPKLKSPLGKGPVTFRDPLLKQSSDSELMAQQHHAASAGLASAAGPARPRYLFQRRSKLWGDPVESRGLPGPEDDKPTVISELSSRLQQLNKDTRSLGEEPVGGLGSLLDPAKKSPIAAARLFSSLGELSSISAQRSPGGPGGGASYSVRPSGRYPVARRAPSPVKPASLERVEGLGAGAGGAGRPFGLTPPTILKSSSLSIPHEPKEVRFVVRSVSARSRSPSPSPLPSPASGPGPGAPGPRRPFQQKPLQLWSKFDVGDWLESIHLGEHRDRFEDHEIEGAHLPALTKDDFVELGVTRVGHRMNIERALRQLDGS

SEQ ID NO: 50 - protein, 1043 aa, Homo sapiens
MLCGLSRETPGEADDGPYSKGGKDAGGADVSLACRRQSIPEEFRGITVVELIKKEGSTLGLTISGGTDKDGKPRVSNLRPGGLAARSDLLNIGDYIRSVNGIHLTRLRHDEIITLLKNVGERVVLEVEYELPPPAPENNPRIISKTVDVSLYKEGNSFGFVLRGGAHEDGHKSRPLVLTYVRPGGPADREGSLKVGDRLLSVDGIPLHGASHATALATLRQCSHEALFQVEYDVATPDTVANASGPLMVEIVKTPGSALGISLTTTSLRNKSVITIDRIKPASVVDRSGALHPGDHILSIDGTSMEHCSLLEATKLLASISEKVRLEILPVPQSQRPLRPSEAVKVQRSEQLHRWDPCVPSCHSPRPGHCRMPTWATPAGQDQSRSLSSTPFSSPTLNHAFSCNNPSTLPRGSQPMSPRTTMGRRRQRRREHKSSLSLASSTVGPGGQIVHTETTEVVLCGDPLSGFGLQLQGGIFATETLSSPPLVCFIEPDSPAERCGLLQVGDRVLSINGIATEDGTMEEANQLLRDAALAHKVVLEVEFDVAESVIPSSGTFHVKLPKKRSVELGITISSASRKRGEPLIISDIKKGSVAHRTGTLEPGDKLLAIDNIRLDNCPMEDAVQILRQCEDLVKLKIRKDEDNSDELETTGAVSYTVELKRYGGPLGITISGTEEPFDPIVISGLTKRGLAERTGAIHVGDRILAINNVSLKGRPLSEAIHLLQVAGETVTLKIKKQLDRPLLPRKSGSLSETSDADEDPADALKGGLPAARFSPAVPSVDSAVESWDSSATEGGFGGPGSYTPQAAARGTTPQERRPGWLRGSPPPTEPRRTSYTPTPADESFPEEEEGDDWEPPTSPAPGPAREEGFWRMFGEALEDLESCGQSELLRELEASIMTGTVQRVALEGRPGHRPWQRGREVRASPAEMEELLLPTPLEMHKVTLHKDPMRHDFGFSVSDGLLEKGVYVHTVRPDGPAHRGGLQPFDRVLQVNHVRTRDFDCCLAVPLLAEAGDVLELIISRKPHTAHSSRAPRSPGPSSPRML

SEQ ID NO: 51 - protein, 421 aa, Homo sapiens
SPGSPKLGPWSQHVSPLLCIGLCPPPVSMAELRQVPGGRETPQGELRPEVVEDEVPRSPVAEEPGGGGSSSSEAKLSPREEEELDPRIQEELEHLNQASEEINQVELQLDEARTTYRRILQESARKLNTQGSHLGSCIEKARPYYEARRLAKEAQQETQKAALRYERAVSMHNAAREMVFVAEQGVMADKNRLDPTWQEMLNHATCKVNEAEEERLRGEREHQRVTRLCQQAEARVQALQKTLRRAIGKSRPYFELKAQFSQILEEHKAKVTELEQQVAQAKTRYSVALRNLEQISEQIHARRRGGLPPHPLGPRRSSPVGAEAGPEDMEDGDSGIEGAEGAGLEEGSSLGPGPAPDTDTLSLLSLRTVASDLQKCDSVEHLRGLSDHVSLDGQELGTRSGGRRGSDGGARGGRHQRSVSL

SEQ ID NO: 52 - protein, 1644 aa, Homo sapiens
TLESKDSGIIATITSSSENDDRSGSSLEWNKDGSLRLGVQKGVLHDRRADNCSPVAEEETTGSAESTLPKAESSAGDGPVPYSQGSSSLIMPRPNSVAATSSTKLEDLSYLDGQRNAPLRTSIRLPWHNTAGGRAQEVKARFAPYKPQDILLKPLLFEVPSITTDSVFVGRDWLFHQIEENLRNTELAENRGAVVVGNVGFGKTAIISKLVALSCHGSRMRQIASNSPGSSPKTSDPTQDLHFTPLLSPSSSTSASSTAKTPLGSISAENQRPREDAVKYLASKVVAYHYCQADNTYTCLVPEFVHSIAALLCRSHQLAAYRDLLIKEPQLQSMLSLRSCVQDPVAAFKRGVLEPLTNLRNEQKIPEEEYIILIDGLNEAEFHKPDYGDTLSSFITKIISKFPAWLKLIVTVRANFQEIISALPFVKLSLDDFPDNKDIHSDLHAYVQHRVHSSQDILSNISLNGKADATLIGKVSSHLVLRSLGSYLYLKLTLDLFQRGHLVIKSASYKVVPVSLSELYLLQCNMKFMTQSAFERALPILNVALASLHPMTDEQIFQAINAGHIQGEQGWEDFQQRMDALSCFLIKRRDKTRMFCHPSFREWLVWRADGENTAFLCEPRNGHALLAFMFSRQEGKLNRQQTMELGHHILKAHIFKGLSKKTGISSSHLQALWIGYSTEGLSAALASLRNLYTPNVKVSRLLILGGANVNYRTEVLNNAPILCVQSHLGHEEVVTLLLEFGACLDGTSENGMTALCYAAAAGHMKLVCLLTKKGVRVDHLDKKGQCALVHSALRGHGDILQYLLTCEWSPGPPQPGTLRKSHALQQALTAAASMGHSSVVQCLLGMEKEHEVEVNGTDTLWGETALTAAAGRGKLEVCELLLGHGAAVSRTNRRGVPPLFCAARQGHWQIVRLLLERGCDVNLSDKQGRTPLMVAACEGHLSTVEFLLSKGAALSSLDKEGLSALSWACLKGHRAVVQYLVEEGAAIDQTDKNGRTPLDLAAFYGDAETVLYLVEKGAVIEHVDHSGMRPLDRAIGCRNTSVVVALLRKGAKLGNAAWAMATSKPDILIILLQKLMEEGNVMYKKGKMKEAAQRYQYALRKFPREGFGEDMRPFNELRVSLYLNLSRCRRKTNDFGMAEEFASKALELKPKSYEAFYARARAKRNSRQFVAALADLQEAVKLCPTNQEVKRLLARVEEECKQLQRSQQQKQQGPLPAPLNDSENEEDTPTPGLSDHFHSEETEEEETSPQEESVSPTPRSQPSSSVPSSYIRNLQEGLQSKGRPVSPQSRAGIGKSLREPVAQPGLLLQPSKQAQIVKTSQHLGSGQSAVRNGSMKVQISSQNPPPSPMPGRIAAAPAGSRTQHLEGTGTFTTRAGCGHFGDRLGPSQNVRLQCGENGPAHPLPSKTKTTERLLSHSSVAVDAAPPNQGGLATCSDVRHPASLTSSGSSGSPSSSIKMSSSTSSLTSSSSFSDGFKVQGPDTRIKDKVVTHVQSGTAEHRPRNTPFMGIMDKTARFQQQSNPPSRSWHCPAPEGLLTNTSSAAGLQSANTEKPSLMQVGGYNNQAKTCSVSTLSASVHNGAQVKELEESKCQIPVHSQENRITKTVSHLYQESISKQQPHISNEAHRSHLTAAKPKRSFIESNV

SEQ ID NO: 53 - protein, 534 aa, Homo sapiens
PQRPAMKPHLKQWRQRMLFGIFAWGLLFLLIFIYFTDSNPAEPVPSSLSFLETRRLLPVQGKQRAIMGAAHEPSPPGGLDARQALPRAHPAGSFHAGPGDLQKWAQSQDGFEHKEFFSSQVGRKSQSAFYPEDDDYFFAAGQPGWHSHTQGTLGFPSPGEPGPREGAFPAAQVQRRRVKKRHRRQRRSHVLEEGDDGDRLYSSMSRAFLYRLWKGNVSSKMLNPRLQKAMKDYLTANKHGVRFRGKREAGLSRAQLLCQLRSRARVRTLDGTEAPFSALGWRRLVPAVPLSQLHPRGLRSCAVVMSAGAILNSSLGEEIDSHDAVLRFNSAPTRGYEKDVGNKTTIRIINSQILTNPSHHFIDSSLYKDVILVAWDPAPYSANLNLWYKKPDYNLFTPYIQHRQRNPNQPFYILHPKFIWQLWDIIQENTKEKIQPNPPSSGFIGILIMMSMCREVHVYEYIPSVRQTELCHYHELYYDAACTLGAYHPLLYEKLLVQRLNMGTQGDLHRKGKVVLPGFQAVHCPAPSPVIPHS

SEQ ID NO: 54 - protein, 1767 aa, Homo sapiens
GKAREQHAALPSASSHCQICEEFRSISRKIYEKPNSIEELAELREWMKGIPERLVGLEERIVKVMDDYQVMDEFLYNLSSDDFNDKWIASNWPSKILGQIELVQQQHVEDEEKFRKIQIMDQNNFQEKLEGLQLVVAGFSIHVEISRAHEIANEVRRVKKQLKDCQQLAMLYNNRERIFSLPITNYDKLSRMVKEFQPYLDLWTTASDWLRWSESWMNDPLSAIDAEQLEKNVVEAFKTMHKCVKQFKDMPACQEVALDIRARIEEFKPYIPLIQGLRNPGMRIRHWETLSNQININVRPKANLTFARCLEMNLQDHIESISKVAEVAGKEYAIEQALDKMEKEWSTILFNVLPYKATDTYILKSPDEASQLLDDHIVMTQNMSFSPYKKPFEQRINSWENKLKLTQEVLEEWLNCQRSWLYLEPIFSSEDINQQLPVESKRYQTMERIWKKIMKNAYENREVINVCSDLRMLDSLRDCNKILDLVQKGLSEYLETKRSAFPRFYFLSDDELLEILSQTKDPTAVQPHLRKCFENIARLLFQEDLEITHMYSAEGEEVQLCFSIYPSSNVEDWLREVERSMKASVHDIIEKAIRAYPTMPRTQWVLNWPGQVTIAGCQTYWTMEVAEALEAGNLRSQLFPQLCQQLSDLVALVRGKLSRMQRAVLSALIVIEVHAKDVVSKLIQENVVSVNDFQWISQLRYYWTNNDLYIRAVNAEFIYGYEYLGNSGRLVITPLTDRCYLTLTGALHLKFGGAPAGPAGTGKTETTKDLGKALAIQTVVFNCSDQLDFMAMGKFFKGLASAGAWACFDEFNRIDIEVLSVVAQQITTIQKAQQQRVERFMFEGVEIPLVPSCAVFITMNPGYAGRTELPDNLKALFRPVAMMVPDYAMITEISLYSFGFNEASVLAKKITTTFKLSSEQLSSQDHYDFGMRAVKTVISAAGNLKRENPSMNEELICLRAIRDVNVPKFLQEDLKLFSGIVSDLFPTIKEEDTDYGILDEAIREACRNSNLKDVEGFLTKCIQLYETTVVRHGLMLVGPTGSGKSTCYRVLAAAMTSLKGQPSISGGMYEAVNYYVLNPKSITMGQLYGEFDLLTHEWTDGIFSSFIRAGAITSDTNKKWYMFDGPVDAIWIENMNTVLDDNKKLCLSSGEIIKLTEAMTMMFEVQDLAVASPATVSRCGMVYLEPSILGLMPFIECWLRKLPPLLKPYEEHFKALFVSFLEESISFVRSSVKEVIASTNCNLTMSLLKLLDCFFKPFLPREGLKKIPSEKLSRIVELIEPWFIFSLIWSVGATGDSSGRTSFSHWLRLKMENEQLTLLFPEEGLVFDYRLEDAGISGTNDSEDEEEEYKQVAWVKWMDSSAPFTMVPDTNYCNIIVPTMDTVQMSHLLDMLLTNKKPVLCIGPTGTGKTLTISDKLLKNLALDYISHFLTFSARTSANQTQDFIDSKLDKRRKGVFGPPLGRNFIFFIDDLNMPALETYGAQPPIELLRQWMDHGGWYDRKIIGAFKNLVDINFVCAMGPPGGGRNTVTPRLMRHFNYLSFAEMDEVSKKRIFSTILGNWLDGLLGEKSYRERVPGAPHIAHFTEPLVEATIMVYATITSQLLPTPAKSHYTFNLRDLSKVFQGMLMADPAKVEDQVQLLRLWYHENCRVFRDRLVNEEDRSWFDQLLKRCMEQWEVTFNKVCPFQPILYGDFMSPGSDVKSYELITSESKMMQVIEEYIEDYNQINTAKLKLVLFMDAMSHICRISRTLRQALGNALLLGVGGSG

SEQ ID NO: 55 - protein, 1313 aa, Homo sapiens
PPRASFAAAVAAAARDSRRAVMADPAAPTPAAPAPAQAPAPAPEAVPAPAAAPVPAPAPASDSASGPSSDFGPEAGSQRLLFSHDLVSGRYRGSVHFGLVRLIHGEDSDSEGEEEGRGSSGCSEAGGAGHEEGRASPLRRGYVRVQWYPEGVKQHVKETKLKLEDRSVVPRDVVRHMRSTDSQCGTVIDVNIDCAVKLIGTNCIIYPVNSKDLQHIWPFMYGDYIAYDCWLGKVYDLKNQIILKLSNGARCSMNTEDGAKLYDVCPHVSDSGLFFDDSYGFYPGQVLIGPAKIFSSVQWLSGVKPVLSTKSKFRVVVEEVQVVELKVTWITKSFCPGGTDSVSPPPSVITQENLGRVKRLGCFDHAQRQLGERCLYVFPAKVEPAKIAWECPEKNCAQGEGSMAKKVKRLLKKQVVRIMSCSPDTQCSRDHSMEDPDKKGESKTKSEAESASPEETPDGSASPVEMQDEGAEEPHEAGEQLPPFLLKEGRDDRLHSAEQDADDEAADDTDDTSSVTSSASSTTSSQSGSGTSRKKSIPLSIKNLKRKHKRKKNKITRDFKPGDRVAVEVVTTMTSADVMWQDGSVECNIRSNDLFPVHHLDNNEFCPGDFVVDKRVQSCPDPAVYGVVQSGDHIGRTCMVKWFKLRPSGDDVELIGEEEDVSVYDIADHPDFRFRTTDIVIRIGNTEDGAPHKEDEPSVGQVARVDVSSKVEVVWADNSKTIILPQHLYNIESEIEESDYDSVEGSTSGASSDEWEDDSDSWETDNGLVEDEHPKIEEPPIPPLEQPVAPEDKGVVISEEAATAAVQGAVAMAAPMAGLMEKAGKDGPPKSFRELKEAIKILESLKNMTVEQLLTGSPTSPTVEPEKPTREKKFLDDIKKLQENLKKTLDNVAIVEEEKMEAVPDVERKEDKPEGQSPVKAEWPSETPVLCQQCGGKPGVTFTSAKGEVFSVLEFAPSNHSFKKIEFQPPEAKKFFSTVRKEMALLATSLPEGIMVKTFEDRMDLFSALIKGPTRTPYEDGLYLFDIQLPNIYPAVPPHFCYLSQCSGRLNPNLYDNGKVCVSLLGTWIGKGTERWTSKSSLLQVLISIQGLILVNEPYYNEAGFDSDRGLQEGYENSRCYNEMALIRVVQSMTQLVRRPPEVFEQEIRQHFSTGGWRLVNRIESWLETHALLEKAQALPNGVPKASSSPEPPAVAELSDSGQQEPEDGGPAPGEASQGSDSEGGAQSLASASRDHTDQTSETAPDASVPPSVKPKKRRKSYRSFLPEKSGYPDIGFPLFPLSKGFIKSIRGVLTQFRAALLEAGMPECTEDK

SEQ ID NO: 56 - protein, 765 aa, Homo sapiens
MNQFLRTSFQEFLKRPDHKQDFVAQWQADFNSLPDDLWDDEETKAELHQRVNDLRDRLWDICDARKEEAEQERLDIINESWLQDTLGMTMNHFFSLMQAELNRFQDTKRLLQDYYWGMESKIPVEDNKRFTRIPLVQLDSKDNSESQLRIPLVPRISISLETVTPKPKTKSVLKGKMDNSLENVESNFEADEKLVMDTWQQASLAVSHMVAAEIHQRLMEEEKENQPADPKEKSPQMGANKKVKKEPPKKKQEDKKPKGKSPPMAEATPVIVTTEEIAEIKRKNELRVKIKEEHLAALQFEEIATQFRLELIKTKALALLEDLVTKVVDVYKLMEKWLGERYLNEMASTEKLTDVARYHIETSTKIQNELYLSQEDFFINGNIKVFPDPPPSIRPPPVEKEEDGTLTIEQLDSLRDQFLDMAPKGIIGNKAFTDILIDLVTLNLGTNNFPSNWMHLTQPELQELTSLLTVNSEFVDWRKFLLVTSMPWPIPLEEELLETLQKFKAVDKEQLGTITFEQYMQAGLWFTGDEDIKIPENPLEPLPFNRQEHLIEFFFRLFADYEKDPPQLDYTQMLLYFACHPDTVEGVYRALSVAVGTHVFQQVKASIPSAEKTSSTDAGPAEEFPEPEENAAREERKLKDDTEKREQKDEEIPENANNEKMSMETLLKVFKGGSEAQDSNRFASHLKIENIYAEGFIKTFQDLGAKNLEPIEVAVLLKHPFIQDLISNYSDYKFPVHIIYVVEMIVCAKGWAPLPSGKQCARWRN

SEQ ID NO: 57 - protein, 439 aa, Homo sapiens [sequence omitted]

SEQ ID NO: 58 - protein, 879 aa, Homo sapiens
MMFYRLLSIVGRQRASPGWQNWSSARNSTSAAEARSMALPTQAQVVICGGGITGTSVAYHLSKMGWKDIVLLEQGRLAAGSTRFCAGILSTARHLTIEQKMADYSNKLYYQLEQETGIQTGYTRTGSIFLAQTQDRLISLKRINAGLNVIGIPSEIISPKKVAELHHLLNVHDLVGAMHVPEDAVVSSADVALALASAASQNGVQIYDRTSVLHVMVKKGQVTGVETDKGQIECQYFVNCAGQWAYELGLSNEEPVSIPLHACEHFYLLTRPLETPLQSSTPTIVDADGRIYIRNWQGGILSGGFEKNPKPIFTEGKNQLEIQNLQEDWDHFEPLLSSLLRRMPELETLEIMKLVNCPETFTPDMRCIMGESPAVQGYFVLAGMNSAGLSFGGGAGKYLAEWMVHGYPSENVWELDLKRFGALQSSRTFLRHRVMEVMPLMYDLKVPRWDFQTGRQLRTSPLYDRLDAQGARWMEKHGFERPKYFVPPDKDLLALEQSKTFYKPDWFDIVESEVKCCKEAVCVIDMSSFTKFEITSTGDQALEVLQYLFSNDLDVPVGHIVHTGMLNEGGGYENDCSIARLNKRSFFMISPTDQQVHCWAWLKKHMPKDSNLLLEDVTWKYTALNLIGPRAVDVLSELSYAPMTPDHFPSLFCKEMSVGYANGIRVMSMTHTGEPGFMLYIPIEYALHVYNEVMSVGQKYGIRNAGYYALRSLRIEKFFAFWGQDINNLTTPLECGRESRVKLEKGMDFIGRDALLQQKQNGVYKRLTMFILDDHDSDLDLWPWWGEPIYRNGQYVGKTTSSAYSYSLERHVCLGFVHNFSEDTGEEQVVTADFINRGEYEIDIAGYRFQAKAKLYPVASLFTQKRRKDDMELSDLHGK

SEQ ID NO: 59 - protein, 699 aa, Homo sapiens
IKFRLWPTLHLDPLSPKDAKSIIIAECHSVDIKLSKEQEKKLERHCRSATTCNALYVTLFGKMIARAGRAGNLDKILHQCFQCQDTLSLYRLVLHSIRESMANDVDKELMKQILCLVNVSHNGVSESELMELYPEMSWTFLTSLIHSLYKMCLLTYGCGLLRFQHLQAWETVRLEYLEGPTVTSSYRQKLINYFTLQLSQDRVTWRSADELPWLFQQQGSKQKLHDCLLNLFVSQNLYKRGHFAELLSYWQFVGKDKSAMATEYFDSLKQYEKNCEGEDNMSCLADLYETLGRFLKDLGLLSQAIVPLQRSLEIRETALDPDHPRVAQSLHQLASVYVQWKKFGNAEQLYKQALEISENAYGADHPYTARELEALATLYQKQNKYEQAEHFRKKSFKIHQKAIKKKGNLYGFALLRRRALQLEELTLGKDTPDNARTLNELGVLYYLQNNLETADQFLKRSLEMRERVLGPDHPDCAQSLNNLAALCNEKKQYDKAEELYERALDIRRRALAPDHPSLAYTVKHLAILYKKMGKLDKAVPLYELAVEIRQKSFGPKHPSVATALVNLAVLYSQMKKHVEALPLYERALKIYEDSLGRMHPRVGETLKNLAVLSYEGGDFEKAAELYKRAMEIKEAETSLLGGKAPSRHSSSGDTFSLKTAHSPNVFLQQGQRKVQSNLLSPEGLSNICAQEKTTRFTSS

SEQ ID NO: 60 - protein, 1179 aa, Homo sapiens
ARAALKRETTESEKYIYEKKSETKKMETIVMQENNEQTDTLPSQHDEASLMISREKDTLGHRNEEAVILPCTQTERNLSPSNSCEPKEESQSAPVQKNDSVVSVGTNNVNTFQQEMKESVIQTARQVRGRLQRPRPNIRKTGQRQIVDKGEAKGIIKEGRTILPKDETEKKVLTVSNSQIETEIEVPSSAVPEHRMYENQSQVVLVENLHVNKTNETIRHENKPYVPSSAQMTRRKFQKAKPNLGRAHSKKEEPVLEKVTTDQSKEGKPEDHLLQKGASNTQLLLKEKAELLTSLEVSARKDCVGSKESALAKIDAELEEVGPSRRVGEETVGDNSPSSVVEEQYLNKLTSCPQPLNETSYSKIALDGKTTISSTSEYERNRGERRSHKKFKPNVTRGRGSKRVRGKTSKKEPRASKAMLVTLRASQEEDDDADDFESDYEEESYHLAPEEVNKAPVFVPVGLRSPEPVSAQIEETMEELEITVNVPDVGCIAVVEHELPNTDVTTEEMKQEENLSVPFEMTTSEHIQDEPGTNDGSTEAAITLLTMGDLVLQSEISSEQGDVGVCIIPHVHSKDKSHIPSSLDNVNHKIVHECQELSSPVITTSPASFEENKIVLEEQSSREEISLMEKVKENATPTRNTISKVTSNLRIRSRLAKPKPNLEKTLGTNRLDDYQEVSSLCVTKGAEMETQRETEKNASKATELENKNLGPVTTAENKDQSKLACVHGIKGTSISSEVNLTERNENQEESSQEVHMLSVAPVASSETGPCTLGLDRGLGENSVEEPQIKDSKGDSVLTLPVPEYTPTSIPEVQQENIINPQDLTVNLVANVPQDGEDEQAFILTLVEIPANAVEEFTDATAQFMPNPLLPAPILVKSVNTEERGDMSICLPATSVGQDAMGLSISGRDNSKKPPDNLDLVSRKRFQCRLDKNDHIPPAKKRSLTLRDDCQEYTTEVHSKELTNVFEETGESHKGQDIFLTSGSTLTTPEPQRQQVEAAFQSRGSRSPDACMDKNVPQLPQDEMIVSDKEERTDAAPKSQQMDSRTSSSKASLSRPGRRPLGFLSLICSKNSLESDEPMQVHSKKRLKPLIPGLRKKLKRSNPFNESQEKNRESSDLLPSPSVITTQSENISSSATQVSCDQPLLKEGYKSAQKRAPQGEATTVSEYFFNDIFIEVDETE

SEQ ID NO: 61 - protein, 437 aa, Homo sapiens
GGREGDPEFAEEWDAWSSLGDMTKEEAMIAYVEEMKKIIETMPMTEKVEELLRVIGPFYEIVEDKKSGRSSDITSDLGNVLTSTPNAKTVNGKAESSDSGAESEEEEAQEEVKGAEQSDNDKKMMKKSADHKNLEVIVTNGYDKDGFVQDIQNDIHASSSLNGRSTEEVKPIDENLGQTGKSAVCIHQDINDDHVEDVTGIQHLTSDSDSEVYCDSMEQFGQEESLDSFTSNNGPFQYYLGGHSSQPMENSGFREDIQVPPGNGNIGNMQVVAVEGKGEVKHGGEDGRNNSGAPHREKRGGETDEFSNVRRGRGHRMQHLSEGTKGRQVGSGGDGERWGSDRGSRGSLNEQIALVLMRLQEDMQNVLQRLQKLETLTALQAKSSTSTLQTAPQPTSQRPSWWPFEMSPGVLTFAIIWPFIAQWLVYLYYQRRRRKLN

SEQ ID NO: 62 - protein, 1194 aa, Homo sapiens
AGLESNLKKTEDRKRKLEELLNSVGQKVSELKEKFQSRTSEAAKLEAEVSKAQETIKAAEVLINQLDREHKRWNAQVVEITEELATLPKRAQLAAAFITYLSAAPESLRKTCLEEWTKSAGLEKFDLRRFLCTESEQLIWKSEGLPSDDLSIENALVILQSRVCPFLIDPSSQATEWLKTHLKDSRLEVINQQDSNFITALELAVRFGKTLIIQEMDGVEPVLYPLLRRDLVAQGPRYVVQIGDKIIDYNEEFRLFLSTRNPNPFIPPDAASIVTEVNFTTTRSGLRGQLLALTIQHEKPDLEEQKTKLLQQEEDKKIQLAKLEESLLETLATSQGNILENKDLIESLNQTKASSALIQESLKESYKLQISLDQERDAYLPLAESASKMYFIISDLSKINNMYRFSLAAFLRLFQRALQNKQDSENTEQRIQSLISSLQHMVYEYICRCLFKADQLMFALHFVRGMHPELFQENEWDTFTGVVVGDMLRKADSQQKIRDQLPSWIDQERSWAVATLKIALPSLYQTLCFEDAALWRTYYNNSMCEQEFPSILAKKVSLFQQILVVQVLRPDRLQSAMALFACKTLGLKEVSPLPLNLKRLYKETLEIEPILIIISPGADPSQELQELANAERSGECYHQVAMGQGQADLAIQMLKECARNGDWLCLKNLHLVVSWLPVLEKELNTLQPKDTFRLWLTAEVHPNFTPILLQSSLKITYESPPGLKKNLMRTYESWTPEQISKKDNTHRAHALFSLAWFHAACQERRNYIPQGWTKFYEFSLSDLRAGYNIIDRLFDGAKDVQWEFVHGLLENAIYGGRIDNYFDLRVLQSYLKQFFNSSVIDVFNQRNKKSIFPYSVSLPQSCSILDYRAVIEKIPEDDKPSFFGLPANIARSSQRMISSQVISQLRILGRSITAGSKFDREIWSNELSPVLNLWKKLNQNSNLIHQKVPPPNDRQGSPILSFIILEQFNAIRLVQSVHQSLAALSKVIRGTTLLSSEVQKLASALLNQKCPLAWQSKWEGPEDPLQYLRGLVARALAIQNWVDKAEKQALLSETLDLSELFHPDTFLNALRQETARAVGRSVDSLKFVASWKGRLQEAKLQIKISGLLLEGCSFDGNQLSENQLDSPSVSSVLPCFMGWIPQDACGPYSPDECISLPVYTSAERDRVVTNIDVPCGGNQDQWIQCGAALFLKNQ

SEQ ID NO: 63 - protein, 1560 aa, Homo sapiens
PVCCAGSFRLDPVGYTASALGITHPCALARMKEASGVGGGHSPMCPPHCHMPPGPAGEWPGATVQQPRQRAPTALLQPDAAGPGGGGVSAGVAVLGACPSASEGVLPRPPGRSAPQPPEYPGRPDMAVPGWSAMVRSRLTATSTSQATDHTFLQKSHYHHGDHPSYAKPRLPLPVFTVRHYAGTVTYQVHKFLNRNRDQLDPAVVEMLGQSQLQLVGSLFQEAEPQSRGGRGRPTLASRFQQALEDLIARLGRSHVYFIQCLTPNPGKLPGLFDVGHVTEQLHQAAILEAVGTRSANFPVRVPFEAFLASFQALGSEGQEDLSDREKCGAVLSQVLGAESPLYHLGATKVLLQEQGWQRLEELRDQQRSQALVDLHRSFHTCISRQRVLPRMQARMRGFQARKRYLRRRAALGQLNTILLVAQPLLQRRQRLQLGRWQGWHSSERALERVPSMELGRLEIPAELAVMLKTAESHRDALAGSITECLPPEVPARPSLTLPADIDLFPFSSFVAIGFQEPSLPRPGQPLAKPLTQLDGDNPQRALDINKVMLRLLGDGSLESWQRQIMGAYLVRQGQCWPGLRNELFSQLVAQLWQNPDEQQSQRGWALMAVLLSAFPPLPVLQKPLLKFVSDQAPRGMAALCQHKLLGALEQSQLASGATRAHPPTQLEWLAGWRRGRMALDVFTFSEECYSAEVESWTTGEQLAGWILQSRGLEAPPRGWSVSLHSRDAWQDLAGCDFVLDLISQTEDLGDPARPRSYPITPLGSAEAIPLAPGIQAPSLPPGPPPGPAPTLPSRDHTGEVQRSGSLDGFLDQIFQPVISSGLSDLEQSWALSSRMKGGGAIGPTQQGYPMVYPGMIQMPAYQPGMVPAPMPMMPAMGTVPAMPAMVVPPQPPLPSLDAGQLAVQQQNFIQQQALILAQQMTAQAMSLSLEQQMQQRQQQARASEAASQASPSAVTSKPRKPPTPPEKPQRDLGSEGGCLRETSEEAEDRPYQPKSFQQKRNYFQRMGQPQITVRTMKPPAKVHIPQGEAQEEEEEEEEEEEQEEQEVETRAVPSPPPPPIVKKPLKQGGAKAPKEAEAEPAKETAAKGHGQGPAQGRGTVVRSSDSKPKRPQPSREIGNIIRMYQSRPGPVPVPVQPSRPPKAFLRKIDPKDEALAKLGINGAHSSPPMLSPSPGKGPPPAVAPRPKAPLQLGPSSSIKEKQGPLLDLFGQKLPIAHTPPPPPAPPLPLPEDPGTLSAERRCLTQPVEDQGVSTQLLAPSGSVCFSYTGTPWKLFLRKEVFYPRENFSHPYYLRLLCEQILRDTFSESCIRISQNERRKMKDLLGGLEVDLDSLTTTEDSVKKRIVVAARDNWANYFSRFFPVSGESGSDVQLLAVSHRGLRLLKVTQGPGLRPDQLKILCSYSFAEVLGVECRGGSTLELSLKSEQLVLHTARARAIEALVELFLNELKKDSGYVIALRSYITDNCSLLSFHRGDLIKLLPVATLEPGWQFGSAGGRSGLFPADIVQPAAAPDFSFSKEQRSGWHKGQLSNGEPGLARWDRASEVRKMGEGQAEARPA

SEQ ID NO: 64 - protein, 958 aa, Homo sapiens
GRGRGGGASGGGGGSSMKRRAGLGGSMRSVVGFLSQRGLHGDPLLTQDFQRRRLRGCRNLYKKDLLGHFGCVNAIEFSNNGGQWLVSGGDDRRVLLWHMEQAIHSRVKPIQLKGEHHSNIFCLAFNSGNTKVFSGGNDEQVILHDVESSETLDVFAHEDAVYGLSVSPVNDNIFASSSDDGRVLIWDIRESPHGEPFCLANYPSAFHSVMFNPVEPRLLATANSKEGVGLWDIRKPQSSLLRYGGNLSLQSAMSVRFNSNGTQLLALRRRLPPVLYDIHSRLPVFQFDNQGYFNSCTMKSCCFAGDRDQYILSGSDDFNLYMWRIPADPEAGGIGRVVNGAFMVLKGHRSIVNQVRFNPHTYMICSSGVEKIIKIWSPYKQPGCTGDLDGRIEDDSRCLYTHEEYISLVLNSGSGLSHDYANQSVQEDPRMMAFFDSLVRREIEGWSSDSDSDLSESTILQLHAGVSERSGYTDSESSASLPRSPPPTVDESADNAFHLGPLRVTTTNTVASTPPTPTCEDAASRQQRLSALRRYQDKRLLALSNESDSEENVCEVELDTDLFPRPRSPSPEDESSSSSSSSSSEDEEELNERRASTWQRNAMRRRQKTTREDKPSAPIKPTNTYIGEDNYDYPQIKVDDLSSSPTSSPERSTSTLEIQPSRASPTSDIESVERKIYKAYKWLRYSYISYSNNKDGETSLVTGEADEGRAGTSHKDNPAPSSSKEACLNIAMAQRNQDLPPEGCSKDTFKEETPRTPSNGPGHEHSSHAWAEVPEGTSQDTGNSGSVEHPFETKKLNGKALSSRAEEPPSPPVPKASGSTLNSGSGNCPRTQSDDSEERSLETICANHNNGRLHPRPPHPHNNGQNLGELEVVAYSSPGHSDTDRDNSSLTGTLLHKDCCGSEMACETPNAGTREDPTDTPATDSSRAVHGHSGLKRQRIELEDTDSENSSSEKKLKT

SEQ ID NO: 65 - protein, 715 aa, Homo sapiens
IVNREKLSESVLMKVEREIAILKLIEHPHVLKLHDVYENKKYLYLVLEHVSGGELFDYLVKKGRLTPKEARKFFRQIVSALDFCHSYSICHRDLKPENLLLDEKNNIRIADFGMASLQVGDSLLETSCGSPHYACPEVIKGEKYDGRRADMWSCGVILFALLVGALPFDDDNLRQLLEKVKRGVFHMPHFIPPDCQSLLRGMIEVEPEKRLSLEQIQKHPWYLGGKHEPDPCLEPAPGRRVAMRSLPSNGELDPDVLESMASLGCFRDRERLHRELRSEEENQEKMIYYLLLDRKERYPSCEDQDLPPRNDVDPPRKRVDSPMLSRHGKRRPERKSMEVLSITDAGGGGSPVPTRRALEMAQHSQRSRSVSGASTGLSSSPLSSPRSPVFSFSPEPGAGDEARGGGSPTSKTQTLPSRGPRGGGAGEQPPPPSARSTPLPGPPGSPRSSGGTPLHSPLHTPRASPTGTPGTTPPPSPGGGVGGAAWRSRLNSIRNSFLGSPRFHRRKMQVPTAEEMSSLTPESSPELAKRSWFGNFISLDKEEQIFLVLKDKPLSSIKADIVHAFLSIPSLSHSVLSQTSFRAEYKASGGPSVFQKPVRFQVDISSSEGPEPSPRRDGSGGGGIYSVTFTLISGPSRRFKRVVETIQAQLLSTHDQPSVQALADEKNGAQTRPAGAPPRSLQPPPGRPDPELSSSPRRGPPKDKKLLATNGTPLP

SEQ ID NO: 66 - protein, 105 aa, Homo sapiens
WKGIELEIVNSCEKNNSVCSHHREHEIGAPRCSCNHGHQLDSDEKTCIDLDECENGEACCAQLCINYLGGYKCRCQEGFQITSNGCECDDVDECLDVSIVCDQLH

SEQ ID NO: 67 - protein, 1192 aa, Homo sapiens
LEQILCLGWLWVKTGEKRLRCDSQDLWTWIIIANPLKKEKQADFREVVLQKKMVISLNSCLSFICLLLCHWIGTASPLNLEDPNVCSHWESYSVTVQESYPHPFDQIYYTSCTDILNWFKCTRHRVSYRTAYRHGEKTMYRRKSQCCPGFYESGEMCVPHCADKCVHGRCIAPNTCQCEPGWGGTNCSSACDGDHWGPHCTSRCQCKNGALCNPITGACHCAAGFRGWRCEDRCEQGTYGNDCHQRCQCQNGATCDHVTGECRCPPGYTGAFCEDLCPPGKHGPQCEQRCPCQNGGVCHHVTGECSCPSGWMGTVCGQPCPEGRFGKNCSQECQCHNGGTCDAATGQCHCSPGYTGERCQDECPVGTYGVLCAETCQCVNGGKCYHVSGACLCEAGFAGERCEARLCPEGLYGIKCDKRCPCHLENTHSCHPMSGECACKPGWSGLYCNETCSPGFYGEACQQICSCQNGADCDSVTGKCTCAPGFKGIDCSTPCPLGTYGINCSSRCGCKNDAVCSPVDGSCTCKAGWHGVDCSIRCPSGTWGFGCNLTCQCLNGGACNTLDGTCTCAPGWRGEKCELPCQDGTYGLNCAERCDCSHADGCHPTTGHCRCLPGWSGVHCDSVCAEGRWGPNCSLPCYCKNGASCSPDDGICECAPGFRGTTCQRICSPGFYGHRCSQTCPQCVHSSGPCHHITGLCDCLPGFTGALCNEVCPSGRFGKNCAGICTCTNNGTCNPIDRSCQCYPGWIGSDCSQPCPPAHWGPNCIHTCNCHNGAFCSAYDGECKCTPGWTGLYCTQRCPLGFYGKDCALICQCQNGADCDHISGQCTCRTGFMGRHCEQKCPSGTYGYGCRQICDCLNNSTCDHITGTCYCSPGWKGARCDQAGVIIVGNLNSLSRTSTALPADSYQIGAIAGIIILVLVVLFLLALFIIYRHKQKGKESSMPAVTYTPAMRVVNADYTISGTLPHSNGGNANSHYFTNPSYHTLTQCATSPHVNNRDRMTVTKSKNNQLFVNLKNVNPGKRGPVGDCTGTLPADWKHGGYLNELGAFGLDRSYMGKSLKDLGKNSEYNSSNCSLSSSENPYATIKDPPVLIPKSSECGYVEMKSPARRDSPYAEINNSTSANRNVYEVEPTVSVVQGVFSNNGRLSQDPYDLPKNSHIPCHYDLLPVRDSSSSPKQEDSGGSSSNSSSSSE

SEQ ID NO: 68 - protein, 350 aa, Homo sapiens
SARLGLPKCWDYRCGPPRPAGNILFIRSMSCLCLGLLWTDSCCLPGRVLGPLHPPAAFSPPHPPAVPPSDRAPVPQTVQSLGFAIYRALDWGLDESEERELSPQLERLIDLMANNDSEDSGCGAADEGYGGPEEEEEAEGVPRSVRTFAQAMRLCAARLTDPRGAQAHYQAVCRALFVETLELRAFLARVREAKEMLQKLREDEPHLETPRAELDSLGHTDWARLWVQLMRELRRGVKLKKVQEQEFNPLPTEFQLTPFEMLMQDIRARNYKLRKVMVDGDIPPRVEKDAHELILDFIRSRPPLKQVLPQPPPPQGPPGAWCCPVASLGGVPARLPVASLGGVPVRLRHG

SEQ ID NO: 69 - protein, 244 aa, Homo sapiens
SLRSECCATLGAAWGSPCERCEIDPACARGFARMTGVTCNDVNECESFPGVCPNGRCVNTAGSFRCECPEGLMLDASGRLCVDVRLEPCFLRWDEDECGVTLPGKYRMDVCCCSIGAVWGVECEACPDPESLEFASLCPRGLGFASRDFLSGRPFYKDVNECKVFPGLCTHGTCRNTVGSFHCACAGGFALDAQERNCTDIDECRISPDLCGQGTCVNTPGSFECECFPGYESGFMLMKNCMGR

SEQ ID NO: 70 - protein, 1299 aa, Homo sapiens
QCSYTSPYFYALRKHIKKDHPALKATVTSIMRWAFLDGLIEAGYHCEWCIYSHTEPNGLLLHYQRRHPEHYVDYTYMATKLWAGPDPSPPSLTMPAEAKTYRCRDCVFEAVSIWDITNHYQAFHPWAMNGDESVLLDIIKEKDAVEKPILSSEELAGPVNCENSIPTPFPEQEAECPEDARLSPEKSLQLASANPAISSTPYQCTVCQSEYNNLHGLLTHYGKKHPGMKVKAADFAQDIDINPGAVYKCRHCPYINTRIHGVLTHYQKRHPSIKVTAEDFVHDVEQSADISQNDVEETSRIFKQGYGAYRCKLCPYTHGTLEKLKIHYEKYHNQPEFDVFSQSPPKLPVPLEPEMTTEVSPSQVSITEEEVGEEPVSTSHFSTSHLVSHTVFRCQLCKYFCSTRKGIARHYRIKHNNVRAQPEGKNNLFKCALCAYTNPIRKGLAAHYQKRHDIDAYYTHCLAASRTISDKPNKVIIPSPPKDDSPQLSEELRRAVEKKKCSLCSFQSFSKKGIVSHYMKRHPGVFPKKQHASKLGGYFTAVYADEHEKPTLMEEEERGNFEKAEVEGEAQEIEWLPFRCIKCFKLSFSTAELLCMHYTDHHSRDLKRDFIILGNGPRLQNSTYQCKHCDSKLQSTAELTSHLNIHNEEFQKRAKRQERRKQLLSKQKYADGAFADFKQERPFGHLEEVPKIKERKVVGYKCKFCVEVHPTLRAICNHLRKHVQYGNVPAVSAAVKQEADDPAHLFLDGLEAAKDASGALVGRVDGEHCLLDGMLEDETRPGGYHCSQCDRVLMSMQGLRSHERSHLALAMFTREDKYSCQYCSFVSAFRHNLDRHMQTHHGHHKPFRCKLCSFKSSYNSRLKTHILKAHAGEHAYKCSWCSFSTMTISQLKEHSLKVHGKALTLPRPRIVSLLSSHSHHSSQKATPAEEVEDSNDSSYSEPPDVQQQLNHYQSAALARNNSRVSPVPLSGAAAGTEQKTEAVLHCEFCEFSSGYIQSIRRHYRDKHGGKKLFKCKDCSFYTGFKSAFTMHVEAGHSAVPEEGPKDLRCPLCLYHTKYKRNMIDHIVLHREERVVPIEVCRSKLSKYLQGVVFRCDKCTFTCSSDESLQQHIEKHNELKPYKCQLCYYETKHTEELDSHLRDEHKVSRNFELVGRVNLDQLEQMKEKMESSSSDDEDKEEEMNSKAEDRELMRFSDHGAALNTEKRFPCEFCGRAFSQGSEWERHVLRHGMALNDTKQVSREEIHPKEIMENSVKMPSIEEKEDDEAIGIDFSLKNETVAICVVTADKSLLENAEAKKE

SEQ ID NO: 71 - DNA, 6374 bp, Homo sapiens
ggcagcggcagctggggctgcagcggcgccgggctctagagagccgcaggatcggccagagtgcggagctggacacccgggtcccagatactacagacacccggagaggtggctccttcgccctgaagccttcctcggccccctacgcactcgggccccttccgcagaggattcgcagcgtgagcgccccgcagcccgctcaggaccagctcacaggactaaggaccaaaggcatttctgggcactgagatcctacctctctgcctgcagctatgagcagacgtgtggttcggcaaagcaagttccgccatgtgtttgggcaggcagcaaaggccgaccaggcctacgaggacatccgtgtgtccaaggtcacatgggacagctccttctgtgccgtcaaccccaaattcctggccattattgtggaggctggaggcgggggtgccttcatcgtcctgcctctggccaaggtgagggatcagggaaaggaagcaagtgggaggacactagctggggcccctgggaactcctgagcctttgttctcacctagttccattccatagtcaggagaagcatctgtgtggattggctcctccctattccccaagccctcaaggaccagaggggaggccaccccaccccaccctaacatcagggtggcttactcccactccctagccctcccacctctccatgcaccaccccattcccagcagggaccaggaggggagccgggtgatggagatggttgggacacagcacagccaagcctggccagattccatcactgcctctcctaatgccgcatcccctcatgttttgggtgtggagaacctcctccctagcccaagatgaccatttgattaagtcacatcccagagcagcaaactgaggacagggtcaggctctatccaaagagtccctggttacctccaaggacacttgcagtgaagtagaaagaaagggaacggaaaggaagggggacatgacacataaagccagagccctccctaccctcaggatggggaccaggcaatgactaccacgttagcttcataaccttaagccccttgaccatccacatcccaaggatgactctcccccaacccccaaggtatgaccttgacctggattctggcccctacaccttgttagggtaggctccacaggtggcggggtcaggaagaggcctgaaaaagccagtgactcaccccagacaatgcagacatcatcctgggacacagccccagggctcaaatttcagccggagctgcctcctcccccaatatgtctgctctttcagtaccacatagccaccctctcccccgctgcctggtctggaccagtgtctgcccctgcagaggtctcagaacccccacaagcagcctgtgaagaccaaaaaatagatgggcccccagctcccatttggggatagtaggcaccaggactgcttgctgcttgtggttccaaggtaaaagtggttcacaaggaagagatctgccaagggaggccaggaaagggctgtccagcactacactattatctcaccttgacctcttccaccaggagattcccacagacacttcaataggagaacaggctgaagaacagcctcctccaagtaggtgtctttggaagagcactgggctggaaagttcaaatctcagctctacaagtatcttgttgtgtgtccttgatgaggccatcttacctctctgtgtcacagtccctaatattaaattatttcaactctgccttcagtaaagtgcaggaagtggactggatggggttagaagtgcagagagggatctgcaaagagaaaataggtaataaggaatcgagatgtaagcagatctgctacccactccccaaaaaacacacaggagagtagccccacatcttcttctccaacccctcagacagggcgagtggataagaactacccactggtcactgggcacactgcccctgtgctggatattgactggtgtccacacaatgacaacgttatcgccagtgcctcagacgacaccaccatcatggtaggagccaggtggctactgctgggcagttgagcaggggagcagggaaggctgcctcacctgtgctggggaaggtgctaagggtggtaataagggaggtgctgggtcccagggccctgccctgcccagctcctggactatttttagctacatgcccaccccctcccaggatgcactgcttaggactaattatagccatggccaacttggtgcctggagagcagcagggcagtgctctgaagtctccctgctggagtgaatgggaggtctctggagagctggcagtgccccctcctggctcccagctgcttctgttctaggcatgcaccaccacatcttgccctgtatttgacccttaccactcaagagagccagtagggttaaaaaaaaaggtagggaaggagtggagggacagggtggctcctcattccacccaccatataccttttcttcctacccaggtgtggcagattccagactatacccccatgcgcaacattacggaacctatcatcacacttgagggccactccaagcgtgtgggcatcctctcctggcaccctactgccaggaatgtcctgctcagtgcaggtctgggggctaaggaggggtcccccatagatgggtgggtggtggcaaaggtgggacccaggtgaccatgcctggccactctgggcaggtggtgacaatgtgatcatcatctggaatgtgggcaccggggaggtgctgctgagcctggatgatatgcacccagacgtcatccacagtgtgtgctggaacagcaacggtagcctgctagccaccacctgcaaggacaagaccttgcgcatcattgaccccagaaaaggccaagtggtggcggtgagtgcctggcctggccactccccagaaccccttgaccagtggccagctgtcagcacccttgtacccaccattatcagagcccctggtcccggctttcacctgtcgcatccctgctccagagactagcccccttcccccgtctctgcaaccacaggtctctgccctaagtaagcccccagcctgcaattctctgcccggctcctgttccctcccctcccttgcatctcagaagctcagagaagggctcctcgctttgggattgaggaggggagaagctggaaactccatcctcccaccagaacctgcatgaaacctgagctcctggacccctctcctctcagccggcacccagacgcatcttccagggtctggggcctgacactggctcgagggctggccctttctccttgtggacccgctgggcgggggatggggcaaccctcgcgcgttgcttatcccagccggatgccctgggagggcggcggccctggcctcgccagcctcaagtctaacctggggtgcgggtgcgtgggccgcgtgcatgtctgcgtggagcaagcgcgccgagagcggtcggggctggcgccggggcgctctaacccactaacccggcgagcaggagcaagcccggcctcacgagggcgcccgcccgctgcgggctgtcttcaccgcagacgggaagctgctcagcaccggcttcagcaggatgagtgagcggcaactcgcgctctgggacccggtaggccaggccgcgccgggcgcgctagctcgctccttctctgggtctgccgggagcgccttcccgggctgtggctggcgcccaagaggccagagcggagcggggagctcccattcgggaaaagcctcgctgcgactccggggagccagcagacacccctgctctagggatcggcctttgagcgcgcttaagggttcgggatcggctgagagccgcgtgcctcctgctctctccaggcccggatgctctccaggtcaggggccagacgtggccccgcaggaagctgagtgcttaggccccatttgtctcttccccgcatccgctcctccaccccggacacccaagtcagcaagctggttgctcatccctccatgctcctcagggcaggcagctgggtgatgtccctccctgtctccccctccccccaggagaggtttgcggcccacgaggggatgaggcccatgcgggccgtcttcacgcgccagggccatatcttcaccacgggcttcacccgcatgagccagcgagagctgggcctgtgggacccggtaacgcagctggaggcttggggtgtgtgcctcggggactggcatcacgggagagtggccaggcgccccccacccgcagggcatgcccacctggacaggactgaaggctgctgccacctctgcagcgcctgccattctcacacccacccctctgcccagttttgctgcgtcgcgtgaaggatcctgcgctggcgcccccacctggtgatgccgagtccctgggggtggtttgctgtgactgcatgcggcgcgcagcgggtatatgtgcaggggaggaggagctatgtgcgcaggggaggaggagagatgtgcccaggggaggggcctgcaactctggtcactagaggtttggggcatagggtttgggaaggccaggaagcgtaaaggggcttctgggggtcccgaagtagcacgggagggtggggcagggctggtcacgcctcctgtgctcgggcagaacaacttcgaggagccagtggcactgcaggagatggacacaagcaacggggtcctattgcccttttacgatcccgactccagcatcgtctacctgtgtggcaaggtgctcacggccgggcagggagaacagggcactggatggagatgtggagggccttgtccgggcgcgcccctgaaccgactgattttgcagggcgacagcagcattcggtactttgagattaccgacgagccgcctttcgtgcactacctgaacacgttcagcagcaaagagccgcagcggggcatgggtttcatgcccaaaaggggactggatgtcagcaagtgtgagatcgcccggttctacaagctacacgaaagaaagtgtgaacctatcatcatgactgtgccccgcaagtcagacctcttccaggacgatctgtacccggatacgccaggcccggagccggccctagaagcggacgaatggctatccggccaggacgccgaacccgtgctcatttcgctgagggacggctatgtgccccccaagcaccgcgagctccgggtcacgaagcgcaacatcccggacgtgcgcccgccctccggcccccgccgcagccagtcggccagcgacgcccccttgtcgcagcacaccctggagacgctgctggaagagatcaaggccctccgcgagcgggtgcaggcccaggagcagcgcatcacggctctggagaacatgctgtgcgagctggtggacggcacggactagccccgcgcgccaggcaggcggagcggggcggggcgcacaagctcggccccgccccggcttttagtcccgaactccggaccccgccttcttgggctgggcccgggggcgggactggggagggaactccgcccctcgcgggagaccagaactcttggagcttaggggagacccacgtcgctccagcggaggctggactgcgagcctcgtctgggactcggctggagctggcctagggaggcctggggtaacctggggggctcagcaatggtgctgcacggcgaggtggtgtccccctttgtcctccgcccagggcagggaaagtgcttagtattagcgtgatgcttggggttattggagcctgagcttgacctcaaacgggtggcgatttgatgggtacccccaggctggggaaaatgacagcgcttctcctaatcagctcactggattccatcaccctgagcggtaaaccagatgggcgtcaccccagttctgcagacacatacacaacccgtttgctgcagagccggacccagtggctacacccacagcggtctgtggtagagaactctcttccttctttccaccgacaggggcgagggctgcttcctcgcggcagcccccgcgaagaaatctcgagagaactggcatgaggagttaggttcatcacaaatacacacacactgcccccaaccctctgccgttgcctctctcagaaaaacaagacgtactgaatgaaatattttactaagcgttcagtctgtgcctcctgcatgggtgggagtgaggggaacgagacccccagcctctgcaaatgctacccccaggctcctgggagacctggcgatgcactcctgggctcagggtccatcaggcagcctcttaccctagagctctctccactctgaggttcagaaggaccccaacccacaccgtaggcgttccccccaagtaaagttaggtagcaaaagcc

SEQ ID NO: 72 - DNA, 5877 bp, Homo sapiens
ctttgcctataggtcagcctttattgttcataagaagaagcatgccatgaaaagaaaacctgagggcgggccatcttttagtcaggacacagtgttccaggttcctcagagcagtcactccaaagaggagccctacaaatgcagccagtgtggcaaggccttccgcaatcactcattcctcctcatccatcagagagttcacactggagagaagccatataagtgcagggagtgtgggaaagccttcagatggagttccaatctctaccgacatcagaggattcactctcttcaaaaacagtatgattgccatgaaagtgaaaagactccaaatgtggagccaaaaatcctcactggtgagaaacgtttttggtgtcaagaatgtgggaaaacctttacacgtaaaagaacccttttagatcataagggaatacacagtggagagaagcgctataaatgtaatctatgtgggaaatcttatgatagaaactatcgccttgttaaccatcagaggatccactctacagagagacctttcaaatgtcagtggtgtgggaaagagttcattgggagacataccctttccagtcaccagaggaaacacaccagagcagcacaggctgaacgtagcccgcctgcacggtcttcctctcaggacacaaagttgagattacagaagctaaaaccaagtgaagagatgcccctcgaagactgcaaagaagcttgcagccagagctccaggctcactggactccaggacataagcattgggaaaaagtgccacaaatgcagcatatgtgggaaaacttttaacaagagttcacaactcattagccacaagagatttcatactcgagagaggcccttcaaatgcagcaagtgtggaaagaccttcaggtggtcttcgaacctggctcggcatatgaaaaaccatattagagattagcctgggacctgacagtgacagtgggggtgggttctcagtcccctgctagagaacccttaattataggcattgtggagtaactttgataaagggcccagccctttctgttttggaagctagtgacagaatcccaaggatttgaaagctcggggagtccccagcctgcctgctaggatgtgacgctggggaagtgcagcaccatgtcctttggagcccttctggagactccggcccctaggagtggcctctgcaccatagcctgcggctcccctattcaggtctccttccacaactctgaagagagagaccactgccctttgtggttggacagaatatctgtggcatcatgggctatggctgctggaaaggggccagtgggatcctagatttgtcttcaagtttggcctgtggccatgcctattctgttgactttaaaagcagcagcatcaagaactcctagccttcccaaatgccccctggggagttctggctggggcttcagccttcctggctggcttttggatatctgctagggggttagagtggtctcagcggcaggtggaggagagcaggatgctgggctcaagcgcttggcgtgtggatctctaccagtaccctgttgccatccccatcccacaggcctgcataggcagcagcggtccatctgtttaacagaaatgtgctgagcactcccatacaccaggcgctggtgtgtttgccagagacccagcagggaccagaacagatgaaaatcctgccatcttggatctttacagatgacaaacaaatgggatacgcagtattctggatggtgatgtgtgtagtggacaaagtgaatcagagaagagcagagggagtgctggattgggagatcagtcgtgattttagatagtctggtcagggagggcctcaactgagaaggtgaaatgtgagcaaagacgtgaaggaagccagggaggtagcaggtagctctctagggagagttgcaggcagaggagattgggtcttgactggtgtcctcaggaaggaagcccctgggatggagtgcagggagccagctggaagggaaggagaggggccagggaggccacaggcccggccatatgagcatcatgggtcattacgggggcttgagctggctcagagggaggcagggagcttttggacaattttgagttgaggagtgatgtggtttgaatctgaattatattttataagggttaaccacagatccaaggactcagtaaaagggtgaaaggcttctcatgcagttagccttgctgccagttcccataaatcagactcctccccactccgtttctgaattttctataggatcctcggcctcagcagatataaacgcttaccattgttgtgttcatgtctctagcccctgcacactgcaggcccctctcagcttcacatacccctctccatgtatgagatctggtgctagcaatcagattcaacccgaaggaacaagtgcatgtgcctgctgctctcaggagaaaaggcagcctgttctgggaggagctccctcactggcccacccacttgtgttgaagcaaaaagcaagaatcaattacttaaaggcaaaggagtgatattgctaaagcatgtgagtaatcattgcttctgattattgaagaggtcagattatgaatgaaaggataaaatgttttaatagtagagcagtgtcctgactataggggcccgttcatggagctggtcatttcttgaaatgagaagaaaccaacctggaagatgtctttttcagtagagtatggaataatcttacctgctctggattgccatgagcaggtgaaaatgaaggctctgatattgtgtggtggtgtcacaggatggtgggggcggggcagaagtctcctgttggtgttctgatgcctgttcagctttgtcctcaggaaggtttggtcatcttggttctgccatcctcttgccttcctacggcagcagctgttcatggcactgaagatgtcccttcactgtcccaaaactggcactagaagtggctgggcaggggggccagagtcataggaagggtcttggagtcatcagatctgggttccaggcatggtgtgccttttcttggcaggattgatcttgagcaagtcaatgaacctctgcatcagtttccttatgtgtgaagttagagtgcttggctgtgctacctgattcctgagattggtgaaagagggcttggtttaccaaggctctccatcaagtggttgacctctaggaccagggccctctcagaggtgcagcttccatgtcagttggtgttgtaaccatggaaaagtccctttccaatcaaacttttagcacccctttccccccatctctgctccctttgccacaggataccttgtaaagttcctgccccagtatagggatatttttactgtcttttttattttttgagacagggttgcccagggtggagtgcagtggcaggatcacagcttactgcagccttgacctcccaggctcaggtcccatctgagcctcccgagtagctggggctacaggtgtgtgccaccctgccagctaattttttatatttttttgtagagacaaaacttttattttttttttcccatgttgctcatgctggtctcaaactcctgggctcaagcaatccacccacctctgcctcccaaagtgctgggattacaggcgtgagccactgtgcctgacctgtcatttttatagaatgaaatgtgcttatttctaaacattctaatcaaattttaaaatgtgcaaagaatgaagtgaaaaactgaatttttttttttttttgatacggagtctcactctgtcacccaggctagagtgcagtggcgcgatctccgctcactgcaagctctgcctcctgggctcacaccattctcctgcctcagcctcctcagtagctgggactacaagtgcctgccaccacgcctgggttattttttatatttttagtagagacggggtttcactgtgttagccaggatggtctcgatctccaggatggtctcgatctccaggatggtctcgatctcctgacgtcgtgatccacccgcctcggcctcccaaaatgctgggattacaggtgtgagccactgtgcccggccaaaagaacagaaattattttatcctgaagtaagctgtttatatttgggattatactgaacctatttgtccaataacctgagttttcaaataattttagttctataagtactataattatataaatattaatgaattcagattagctgaaaggaaaaaaagtagaagcctgactacttggtgctaactactaaagattttggcagaatcaatgttggatttggctttcctgtcccttccccatgccagccccccagagtgttctgccttgtgctgcctcccttcacctggagtgccacacccctctctctgccagttcagctcttcattcttcaaggcctgaccttgtctgacccttgtgcctctaaacccgtggccccacctctcttggttcctatgtcaggtgatgtttgtgtttttggttatgcccatctccatagccagaccaagcactctggaagccagggttgggtgcttatttatctgtttgccatgcagaaaatatcttgcacaaaattacctctgttaaggaatctgaagctgaatttagtttggctgagtcagggttgggttttttttaaggggctgtggggtgaaatgttgactggaagccacccacaaacacacacctgctggttaggaacccggctgtgggtggttctgagctgtttggcttcagttgacagtttctgattgccctgagcaccaggtctcatcttgcatctcatcctggcctggagaacattcagtttccttccaacccttcccacctttcccccactcccttggaggaactgaagttggggttgaggagagccagatggctggagtgggtatttgaaggtctttctgtcacctgttcagtgtggtctgccccacccctgctgaccaagactgactgaaatgtaaaataatacagaccatctcacactcagaaagctggcacatttttgaaagcccaagtgtgggtaagtgcgtggaacaacgataattcacactgctttatgagtagaaattgtgagaaatattgtgccaggcaatttgcaaaatcttggaaggttgtgtgcacttaaccacccagcaactactcctggatgcatcctagagaagtgccatgtgaacagagaatgattttaagacttcactgaagtattgtttaggtagcaagattgggaaaagcctgcatttcatcagcagaagaatggataaataaatgggttgtttttggtccttggaaagtgaatatgaaagagttacgtctcaacacagatagatgaaaaattatgctgagaaagttggtgaagctacatacaaggtacccttagtgtaaagttaagcatactgtgtacctgtgggcacgttacttcaacttgtttttcactttttctgtaaaatgggatagtagtggcaatctcacagggtgattgtgggtgggggggtggtcaatgaagtaatgcatgtaaaatgcttagaatagtgtctagcatgtaagccttgtggacatatagaaagtgttattgttttgcacagtaatctattttctgtggattcaaataatatgaaatgagtataaaatcatgtattggaacgatgtgtgcaagtcaccattctgccttcctaaggcaggagacctgatggatttggggagggtacatggggccttcagttgtgttttctttgtttttttctaaaaattgatgcagaggcatcacaatgttaagattttaacagggtagtgtggtgggtactttttaactgtttgcttaaagtgtttcaaagtaaaaatatttcttaag

SEQ ID NO: 73 - DNA, 6180 bp, Homo sapiens
caccgttctgggtgttcctgaaaagcctcagattagtggattctcatcaccagttatggagggtgacttgatgcagctgacttgcaaaacatctggtagtaaacctgcagctgatataagatggttcaaaaatgacaaagagattaaagatgtaaaatatttaaaagaagaggatgcaaatcgcaagacattcactgtcagcagcacactggacttccgagtggaccggagtgatgatggagtggcggtcatctgcagagtagatcacgaatccctcaatgccacccctcaggtagccatgcaggtgctagaaatacactatcctaatgctttggctggccagaatggccctgaccatgctctcataggaggaatagtggctgtagttgtatttgtcacgctgtgttctatctttctgcttggtcgatatctggcaaggcataaaggaacgtatttaacaaatgaagctaaaggagctgaagatgcaccagatgctgatacagccattatcaatgctgaaggcagccaagtcaatgctgaagagaaaaaagagtatttcatttaagatgcaggccaagattctgagttttactaccaggctgaatgctggagaaaactggctatcatctttcagaagtcatttctaccatcgtctgctacccttattaactcccatactgtactgctatcagtagccagtgtataccaacaatcagctgttgaaagcatcattctttaattactgtaccatccataatgcagggcatttcttactgcctaaatttcacaccattgctcttttaacatacagtgcttgaatatacagccttaacaatgttaatcatctccttggatcattatattgagtggtttttatacattaaaaaatgtatgcagagtttttttcccccattttttcccctttaagtcatagaccttatcagtttgccattggacagctttcacaagtaacaggattagggaaggacataatgtatttaagaataagtgaaggttagaggtttacaattaatgttttctacatgtctgtcttcaaagacaacatgctttggaaacatatgtcctagaaaacataaaattaaaaaaaaacactatagtgtagtttttggaatgttggagattatactggtaaagctgtatcgatttgctattgaaatatagtatttgatacaggagccatgtgtacgaattgcaatcatgacatggtattttctataattatagagatcttactattaggatattgtagcttcatttaccaataaattattccaaatgatttactgcttttggaatcacaaatatttaattcatttctctaatttgattctataatttatttgcttcataaagattcacctgcctaaacaatattgaagtatccatagggcacaattttcagacattttagtatctgtatatagtgcatataataaatccaattaaacattatttgatacatatttaacttttttggctgtatgtaattcagtcataagtaagcattttctaacgtccattatatccctttaggtattacttaaaccaatattataagtagataacatgtattagtatttttgtctgtatgtcctagcactgttcaacaacaaatttttctagttcttgttaatttttatttgttatacaatggaagcacaatgttataaggaaaggtaattttaagctaacaaccagtgcacagcctcaggttttaaattacaaccacagttgaataataacctaaaaataaattttagtttgctaaaaatttacaaattttcattttgcagttccagagctgcttacctatgttggtttgccaaaaagaagtgtttaagatatgttttctgtataaatgaactaattctttatattaaattcctgtctatgcattttgtgaggtacaaactgatgaaacagtgagtgatagagaatttctgccatgcttttaactccaaagtgaaagtctctttctctggattattttaaaattttggcgtgtttaaccattaagaaatgctgtattcttaaatatgaaacagttaatctaaagtcttattatttcttctagtaaaataaaatattgttagattagttctcattaaatttattatatgctaaagaataaaactccagttagatttaaaaaaatcccatttacaagcattgcacctttaagaagaaaacaaatatgacagtatggtagctatacttgtgatgtctgacgcatgatggcctatggttttaaaaatagtattgtggaatatatttttgggtaataagaatggttgagtgcaacatcatgtattaatatcaaatgaaagacaagggtgctgtatctttgattatttatcaaaaaagtataaatcttttaaggaaaatgttagaattttaaagtttttttttgattgttgaagcatttatcttgttgatttcttacaaaagaaaaaggacgatgtcagtcaagcagcactttttcagaatatacagaacataaataatatgatgtggttgagtgttaacataataaatcatatacagtatgacattttaaggaaataagtctgcattgatgtgattgcatgcttgtttttacagttcactccataccatctgtggaaaaatgcaataatatgttaatatagtatggtagtttgagagaatcaggtaggtgctactagacacattgaaactagaataggtttataaactgttcatatctttcaatgcataatctttagaaagactccacaaagcaaaattcatcctgttagtacaaaatggaaaggttcttattacagaagtaagttgtacaaactgcatcatcaattactatgtaaagcctaatttcaggatgcacttacaaaattgctactcttcatcgatgccgtatttacatccctcttcatttcatctatattctacttggctccaacaactaaattgttgcctaaataactcaatcattatttatagcactgtaaaattagaaatccaaaattggttgcatttcatgatttttgactcttttaacccttcagagtaatataaaatctcattagaactcttataaaaccagttagctaaaacaactagattattatactagttataaatgctggtatattataatttgtgggatctaattaaatgtttgcctattaaatatagtttgatttaaatgagacaccatgttctgaactggagaaaacaatatcaatgaagtcatattttcatacctttaaaaattatttaattttcaaccaaacaaaaaataaattgtaaaaattatgctcatttctattccaacaagtcagaaaataatgacataatatttctaaatgagaatgatgtcaatttcattgtctggaacatgcacacttgtgtgcacatagagtcaatttctgtctcttctaagtgagcacagtaggtagggaactcaatggaagcagtgtgcacacacacacacccttagtagaatatggagcattattctttaccaaaagtagctattctctgccagtgtactgtttacagtgtaaattgattgtcctccgtcaaaatcaagtctaagcggcattttacttttcttttcttttttattttccatttttgggtgttctagataggattattatcaaaagtaggaggaaaaagaaatgtttgtgagtgcaagattaaagacagagcgcatgagcagagtactgatggtgtgcgtgtttgtgtgtgtgtatatgtgtgtgtataagagagaaagagaaatcgaaaagagagagaaatttcaacttgttttcttttaccagagaatccaagaagcagtttaaggaacctgatattggagtttaatctagaaactggatgatctcatattgattcatgatgcttaatctttcattgaaactccacaattaaaataacaaatagagaaagaaaactaactttcctaaatatggcaaagaaactaacacctcatttatttttatttctttgtaaaaatataaatatctcaatcaaaagtacaggctcatttgtaattatgtactcatgattgtaacagcattgagatttcatataggcacatgtatagcagctgtttgacagtgatggctcttccatgtaacatagcagttatcgtgtaatttagtgccacttattgcaaagtgttaccaaggggaacatttcaaatgccttttgtttttctttggacatcaaggtaatttagtggacaacaaatattaaattttacattatgctttttaattgtggagaaaatgcaaaacctcatgtcttaccacaactttcccatggtattgctaattacttagagtctctaaaattgcccaatattatttccctttgcaaatggtaatttctgataaaacaatacaaaacaaaaaaaaagcagtaatcacagccaaataaatgaaacacctaatgagaattactgttgagtaatgctttttattaagtggcacaaagtacacactaaaaactatgcaaaatataggtaactacagtgtacgtacatgtaagtatcttgtacttgctgtgtatggatgttggaaacccatgtaattataatatgcattttgaatattgggaaagaggaaatcttagtgtagataatagaatttgttttgaaatatacactggcaatattgaaatatactcagtgcaatatctgcagttctattgctggatacttaatgcaaagggattttaaagaattcttcagcaagatccaagaggttgctaatcttcacctctcacatactaaagcattcattaaaaatacaactaattcaaggacaagttaagtttttcttattaatgtgacacagtaacatttttatttggattagtttttggtgttattgcagagaaagaaataacctgagttttaaatttcgattcatatctcattgaattgggaattcttcaattttgtttgaaatgtgtgcatgttttcatagattgtagcaagtacaaatgtattcaatgaaagaacatagggtagttttaatagttaaagtcactatatcttaatgggaattttaaaatatcttttctttttctattcattttttccctttctctctctattctacccccaaacaagccctttgcactcatacccttccaaaggcaatggattgaaagtagcaagataataaagagagttaaaggggacaacatataacaatgggttctaaaatcatcagcatttttatgtattgagattattaatattgaatgcaatagttattggatatagctggtaagttctctgccatgcatacttacaataatccttctacctctcacttttaacatgggctatgatacttcaatataaatagaggaaataattatttaccagatatcccaggaagcattcttatggaactattataacagtgcactccccaccccctgggaaatctcaaaagccaagttcttcagtgtattctatggtgtatgaatctgcatttgtttttccttttctatcattagcttttcctaaaggcaaaatattataactttataagaatagtccttctcctgcctatttaatatttcaatgttaatataattgtattggtttttaaaaataattaaaatggcaacactttgcgatccaatctgatatttaatttttaaaatgtaacaatttcttataaattcatgctgtgttttaagtaaaaatcatgtatatgaattattttaccaagtagtattatctgcacgagacaaatttaagtattttaaaaatcatccttattaataaataatcctcatataatgcacagtattgccacaaatgcccacttcattttgtctgcatagacatattaagaatttttcaatgatgtaatttaattatcctaaaagaaatgacagattcttctgtaggaaaaaataaaaacatgaatatctcaaattataatggttaatctctaaaatatgcttaaagtaagatgtttctatgttatgtggttatgttatcaataatatttggttgatcttcacatattttatatgcatatatatatcaagaagttatatatatataactcaagaaactcaagttatatatatatgtcaagaaatgtatgattattttggagagaatgggcccaaatgtgaaaaagatat

SEQ ID NO: 74 - DNA, 6693 bp, Homo sapiens
attggctgcgagcaggcgggtgtggagtaccgcctggtgcaggatgcctacctgagccggcccggccgtgccctggcccaccagctgggcctggctgaggacgaggacgtgctgttcactgtgttcgcccagggccagaagaaccgcgtgaagccaccaaaggagtcagcactgtgcctgttcacgctcagggccatcaaggagaagattaaggagcgcatccagtcctgctaccgtggtgagggcaagctctccctgccgtggctgctcaacaaggagctgggctgcatcaactcgcccctgcagatcgatgacgacttctgcgggcaggacttcaaccagcccctggggggcacagtcaccattgaggggacgcccctgttcgtggacaaggatgatggcctgaccgccgtggctgcctatgactatcggggccgcactgtggtattcgccggcacgcgaagtggccgcatccgcaagatcctggtggacctctcaaaccccggtggccggcctgccctggcctacgagagcgtcgtggcccaggagggcagccccatcctgcgagacctcgtcctcagccccaaccaccagtacctctacgccatgaccgagaagcaggtgacgcgggtgcctgtggagagctgtgtgcagtacacgtcctgtgagctgtgtctggggtcacgggacccccactgtggctggtgtgtcctgcacagcatctgctcgcggcgggacgcctgtgagcgagcagacgagccccagcgctttgctgcggacctgctgcagtgtgtgcagctgactgtgcagccccgcaatgtgtctgtcaccatgtcccaggtcccacttgtgctgcaggcctggaacgtgcctgacctctcagctggcgtcaactgctccttcgaggacttcacggaatctgagagcgtcctggaggatggccggatccactgccgctcaccctccgcccgggaggtggcgcccatcacgcggggccagggagaccagcgggtggtgaaactctacctaaagtccaaggagacagggaagaagtttgcgtctgtggacttcgtcttctacaactgcagcgtccaccagtcctgcctgtcctgtgtcaacggctcctttccctgccactggtgcaaataccgccacgtgtgcacacacaacgtggctgactgcgccttcctggagggccgtgtcaacgtgtctgaggactgcccacagatcctgccctccacgcagatctacgtgccagtgggagtggtaaaacccatcaccctggccgcacggaacctgccacagccacagtcaggccagcgtggatatgagtgcctcttccacatcccgggcagcccggcccgtgtcaccgccctgcgcttcaacagctccagcctgcagtgccagaattcctcgtactcctacgaggggaacgatgtcagcgacctgccagtgaacctgtcagtcgtgtggaacggcaactttgtcattgacaacccacagaacatccaggcgcacctctacaagtgcccggccctgcgcgagagctgcggcctctgcctcaaggccgacccgcgcttcgagtgcggatggtgcgtggccgagcgccgctgctccctgcgacaccactgcgctgccgacacacctgcatcgtggatgcacgcgcgtcacggcagcagtcgctgcaccgaccccaagatcctcaagctgtcccccgagacgggcccgaggcagggcggcacgcggctcactatcacaggcgagaacctgggcctgcgattcgaagacgtgcgtctgggcgtgcgcgtgggcaaggtgctgtgcagccctgtggagagcgagtacatcagtgcggagcagatcgtctgtgagatcggggacgccagctccgtgcgtgcccatgacgccctggtggaggtgtgtgtgcgggactgctcaccacactaccgcgccctgtcacccaagcgcttcaccttcgtgacaccaaccttctaccgtgtgagcccctcccgtgggcctctgtcagggggcacctggattggcatcgagggaagccacctgaacgcaggcagtgatgtggctgtgtcggtcggtggccggccctgctccttctcctggaggaactcccgtgagatccggtgcctgacaccccccgggcagagccctggcagcgctcccatcatcatcaacatcaaccgcgcccagctcaccaaccctgaggtgaagtacaactacaccgaggaccccaccatcctgaggatcgaccccgagtggagcatcaacagcggtgggaccctcctgacggtcacaggcaccaacctggccactgtccgtgaaccccgaatccgggccaagtatggaggcattgagagggagaacggctgcctggtgtacaatgacaccaccatggtatgccgcgccccgtctgtggccaaccctgtgcgcagcccaccagagctgggggagcggccggatgagctgggcttcgtcatggacaacgtgcgctccctgcttgtgctcaactccacctccttcctctactaccctgaccccgtactggagccactcagccccactggcctgctggagctgaagcccagctccccactcatcctcaagggccggaacctcttgccacctgcacccggcaactcccgactcaactacacggtgctcatcggctccacaccctgtaccctcaccgtgtcggagacgcaactgctgtgcgaggcgcccaacctcactgggcagcacaaggtcacggtgcgggcaggtggcttcgagttctcgccagggacactgcaggtgtactcggacagcctgctgacgctgcctgccattgtgggcattggcggaggcgggggtctcctgctgctggtcatcgtggctgtgctaatcgcctacaagcgcaagtcacgagatgctgaccgcacactcaagcggctgcagctccagatggacaacctggagtcccgcgtggccctcgaatgcaaggaagcctttgcagagctgcagacagacatccacgagctgaccaatgacctggacggtgccggcatccccttccttgactaccggacatatgccatgcgggtgctctttcctgggatcgaggaccaccctgtgctcaaggagatggaggtgcaggccaatgtggagaagtcgctgacactgttcgggcagctgctgaccaagaagcacttcctgctgaccttcatccgcacgctggaggcacagcgcagcttctccatgcgcgaccgcgggaatgtggcctcgctcatcatgacggccctgcagggcgagatggaatacgccacaggcgtgctcaagcagctgctttccgacctcatcgagaagaacctggagagcaagaaccaccccaagctgctactgcgccggactgagtcggtggcagagaagatgctaactaactggttcaccttcctcttgtataagttcctcaaggagtgcgctggggagccgctgttcatgctgtactgcgccatcaagcagcagatggagaagggccccattgacgccatcacgggtgaggcacgctactccctgagtgaggacaagctcatccggcagcagattgactacaagacactgaccctgaactgtgtgaaccctgagaatgagaatgcacctgaggtgccggtgaaggggctggactgtgacacggtcacccaggccaaggagaagctgctggacgctgcctacaagggcgtgccctactcccagcggcccaaggccgcggacatggacctggagtggcgccagggccgcatggcgcgcatcatcctgcaggacgaggacgtcaccaccaagattgacaacgattggaagaggctgaacacactggctcactaccaggtgacagacgggtcctcggtggcactggtgcccaagcagacgtccgcctacaacatctccaactcctccaccttcaccaagtccctcagcagatacggtgaggggccaggcagcgggcgagagggcagcgcatgggtccctggcctgggcaggacgtcccccgggctcccacgctgcagcagccggacgggaggacccaggggcaggtgtcaagcctgtcactcgcactcttggccttaccctccagctctggaggctgcgcctcctcgcgactgtgtgtccgtacacaattatgccacctctgtggtgtcatcggctgccccaaaatcccacatgggtgggggtgccatccccagctttcagatggggaaacaggctcgggcggggggtgcggggtgccagccaacgcgggcgctgacagcctggtgctgcagagagcatgctgcgcacggccagcagccccgacagcctgcgctcgcgcacgcccatgatcacgcccgacctggagagcggcaccaagctgtggcacctggtgaagaaccacgaccacctggaccagcgtgagggtgaccgcggcagcaagatggtctcggagatctacttgacacggctactggccaccaagggcacactgcagaagtttgtggacgacctgtttgagaccatcttcagcacggcacaccggggctcagccctgccgctggccatcaagtacatgttcgacttcctggatgagcaggccgacaagcaccagatccacgatgctgacgtgcgccacacctggaagagcaactgcctgcccctgcgcttctgggtgaacgtgatcaagaacccacagtttgtgttcgacattcacaagaacagcatcacggacgcctgcttgtcggtggtggcccagaccttcatggactcctgctccacctctgagcacaagctgggcaaggactcaccctccaacaagctgctctacgccaaggacatccccaactacaagagctgggtggagaggtactatgcagacatcgccaagatgccagccatcagcgaccaggacatgagtgcgtatctggctgagcagtcccgcctgcacctgagccagttcaacagcatgagcgccttgcacgagatctactcctacatcaccaagtacaaggatgagatcctggcagccctggagaaggatgagcaggcgcggcggcagcggctgcggagcaagctggagcaggtggtggacacgatggccctgagcagctgagccccagctgtgatcatccagcatgatgcagcgtgaggacagctgagcagggaccgggacagccctcaccgcatgcgtgtggagtgtccggtggtgctcgggccgccgcagtgcagcgactgcccggccctccctcccctgcctcacccggtcgggtcccggctcttcctgtgtggaggtgatggtacctgccacaccacagctgcgcacacagctgcttgctcaggggccgggacagcactgggtgctcaggctggccaaggaccttcattgcctggcaagagctgcccagtggccttcatgggagaagggctgacctctgaggggctgaggggtgaggccagggccctccagggggaggggtagccagcttgggctgtccccttgagaccaggacaagaggctgggggtgtcagcattcccagctttccaagctgcccccaggcggcagagtctgagggtcccggggcccggttggcagctggagaaagaggcaaaaagcccgtagccgggcaagaggagctcaagtcggtctgggcccgttgccaccgactcccacctccagcacccatgcccgctgcaccgctgccatcctcagattcaccgcgtgctctgcgcggccgaggccggagcaccacatccacctcgccccagagaggctctgctccctcctatggaggggctgtgggccaggctgctcagactcctgggtggcttccagacggaccgggcagcccctctccgtcctcagggctgtgcctctgggagccactgggccaggggccccgggtcgcagagagcacgttcccgttatttattcccctccgcgtcctacacaggctgccctggcagctgtcttcaagggtaggctgagctccccaccctggagcccctgagggcggcccctgagcactcctctctctccactctctctgtccctgccccagcggcttccagtgtggcatctcagcagtgtcctggcccctccagagcagtgggacatctggggactgtttttgtgtttagggaaaaaaattctgctgcactctgcttgggccttgaggtctgtggcagggctcctctggcccgcagtggcctggatctatctgggccatgagtgacgggcagtgaccagagggactggaggccagcggtgtccacccttgccctcagcaagagagaatgcattcttaaaagaaagctgtacatgtatatatatgcatatatatatatgtggctctagcctcaggctccagccccagtggggtactgtacagttaactgaagaagaattttaaagacgatttgaacaagaaaatgaaggcagtgggaaagcaatgccaaatggttgtggagaaagtggccggagcctccctggagtggagcagccctgaagcctgtgccccccgacctgcgggccgctgttttggtttgacatgacaaggaaaggacttcctgctgaccctgagagcctctggggtgccgcggcaccacggggcatgcatgattgtgctagcgtttagtctgagttgatctttttaaaactgcaagtgttgaatact

SEQ ID NO: 75 - DNA, 6309 bp, Homo sapiens
ccgtgctgttcagcagggatttggaagtagggggacagttaatgacaggcatggtggccacatacaggatggaaaaagcaggaaggtggctgtgggtctcgaaggtctctggcttggctgccaggcagaggcgggcaggtgaccacaggagaggcctgggctgctgtcaggggagacatctgtgctgccgtggcacccagcagccgggaggacaggtggttggtgcccagatgcacccagcctacttacaggacaaaagccagtcagaaaacgtgggcatggtggggaccgctaagaggaaaccatgtggagtttatagagcaatgtcaaaatcgtaatttacaggtgaaagcagtatgggcataattttttgttaactgaagaaaattgaacagttggagaagagactctttcttacactttcatggagaagaccaaagttaacaaagtttcggggccaaatgacagtcccagggaggagagggaagcccttggtccccctacccctgtcccgtaagcatttagctccccttggggacagagctgaccctaagcgtgacagtcctcactgctgggtgccacacctgtgggctctcttgctctccatttgtcagatggaggctgtgtgtatgtgtgtgcgtgcatgtgtgtgtgtgtgcaggtatgcatgtgtgtatgtgcatgcatgtatgtgtgcgcacacatgcttgtatgcatgtttgtacacgtgtgtacatgtgtgtgcactgtgcttgcaagtgtgcatgcatcgtgttgtgcatgtgtgagcatgtatgcacgtgtgtgcatgcatgtgtgcacgtgtgcttgtatgcatgtttctacacgtgtgtgcatgtgtgcacactgcttgcaggtgtgcatcatgtgcatggtgtgcatgtgtgtgcgagcatgtatgcacgtgtgtgcacacgcaggtctgtatgcatgtgtgcatgcatgtatgcgtgtgcgtgcgtgtgtgtgtgtgtgcatgctgcagcatggggctggactggtgcagtagggaggtagtcacggtcaaggtgggaaatgggaggaaagaccagaaaagattaaagttaacgcagcctttctctgtgcatagaacatcctgaagagggtagaagagaggtctgagcgggagtgcactgctttggatgctcacaaggagctggaaatggtggtgaaggcatgcaacgagggcgtcaggaaaatgagccgcacggaacagatgatcagcattcagaagaagatggagttcaagatcaaggtgaaccggtgggattggtgtgagcctgtgcccatgcacaggcccctggccccgccccagaggcacagatcaccgcgcctggctggccttgcttaggtccttggtcactggccacacttaggatcccctctgccccctgacctccccagctgaagccaccccgcctgccaccaggcgtcagacaccaccacggtggtccggatctgtctcctgggagacgggagtgcggggctagtgtgcggcccagacccacgcagggtgtggaccctgctctcacctgcccgctgcgtggccttgagcagtcagtttacatggaggatgtggggggtgctgctccagggattctcaaaccaggaggatttggaagttaccagcttcccccaaacttcacagaaaacttcaggcattcgtgaaccctcaggtcgcctgggcccgactttctgggaacttggccacatcagcacgctgtgcccacagacggtccctgaggccaggcttggtttgggagctgagccccactagaggaggcagaggcggtcttctgggcgtcccatgtagctccacacggtgctgaccgatggctgccaggcgcctgcccctgagttgcatcgtctgccaggcggccgttcagctgcaggcctggcctccttgccccgcgggtcccattctttcctctctactgtgaactcagccccttctctgattctgcatcccacaggcagagcttggtgggggcaatgatgacagacactagctgccacactcacaggcacacacacggtatccacacagcagtgcacacatgtaaacagcagtgtacatgcacacaagcacgtgcacataactttaagctcacatgtgggtacacaacacagtccatacacatagaagtccacatgcacagcacacacacgcatagcacactcatgcccacaggggtgcatgttcacacacacacacacagccctgccatctctctgcatccgtccagaactcggcctttccccccaacttgtgcctcatgtgtcggggccctgggcaggtgtcagggaatgtgacagacgcagccctgggggcatgtcctggggagggacattgtgggcacagcctgcctgatgccctttccccgctgcagtcggtgcccatcatctcccactcccgctggctgctgaagcagggtgagctgcagcagatgtcaggccccaagacctcccggaccctgaggaccaagaagctcttccacgaaatttacctcttcctgttcaacgacctgctggtgatctgccggcagattccaggagacaagtaccaggtatttgactcagctccgcggggactgctgcgtgtggaggagctggaggaccagggccagacgctggccaacgtgttcatcctgcggctgctggagaacgcagatgaccgggaggccacctacatgctaaaggcgtcctctcagagtgagatgaagcgttggatgacctcactggcccccaacaggaggaccaagtttgtttcgttcacatcccggctgctgggtaagtcaccggtgggtaagggggcgccatttgtccttgggctggccctgccggatgccgcaggtgcacggtgtgccctgcctggagggaagccctccctgagctggtggtctcagaggcctgcacgggcctccaggggctgcttcctactggaaacttagtaccggccaataacctggcatggccacactgtgtgaatgctggatgggccttaagtgacaggtaccacaaagtcaccaggaagaatttggaccaaacttcactgctgttttaggtttgccagttgtccgaaaagcttaactagaaaaaagccaggtgcagtggctcatgcctgtaatctcagaattttgggaggccgaggcgggtggatcacctgaggtcaggagctcgagacaagcctggccaacatagcaaaaccccgtctctactaaaaatacgaaatagccaggtgtggtgcgtgcctgtaatcctaactacttggaagctgaggcatgagaattccttgaacctggcatgtggaggttgcagtgagctgagattgcactgcactccagcctggtgacagagggagactctgtctcaaaaagaaaacacaagttcagctgccttatggagaagctgctaaccctgaccatgtgaaccctgtcctgaccaccccaaaccacacccagggccatatcccaggtacaaaaagttccttctgaagtttaaactaaggccccctcacagcctttatgcatgtatttcttcccagaactcctggctatgttaataacgttttctatggaaacaaatcctcctcttcctcagacgagcccttctccagttgctgtgggagttttcctattctaggcagggctcagctgcgggcttggtgggagtgtgcaggtgggtagtgcggtggtggggatgtgcccgtgcctcttgtccctcagactgcccccaggtccagtgcgtgcacccatacgtggctcagcagccagacgagctgacgctggagctcgccgacatcctcaacatcctggacaagactgacgacggtgaggcccagggacctcccctcggggcccccaggggaacttgccccacaagggatgacggggagggggagaagcagatgccaccactgtctgacaggctggtgtcctgccatgtctcttgctccctgagacattctgcttggacactgcccatgctggcttcactggcctctcttcagtgtaaaggaggaattgtttccagtgcctccctgtcctcccctagagccgggagaccccacctttcctccttcgcagtgggcccagcccaagcgggtggcttcgtgtccccctcccctggccctggcctcagcacccccatcacagtgggagggagaacaaccaggaacatcctaagcctgacctgacccagacctgaccctgacctgacccagacctgtacttgcagcttcaggtaaagcctgtgactgccaggctcggtgccccatgtgggccaagaagccgcccccagctcctggccacccctgctgctgtcatcagtaccaagcgaagttcctcccagcccctgtagaattgaacactgaccgcctttcccttttcaaatcacatctgtgtgtctacagtaattgctcctgatccaaatccccaaagtatacaactgcatcttccctgcttcctctcctcctgccgggtcctggtagaaggcctcaggctgtgacctccaggggaggccttctccagggagtccctcttgtgggctgttcccaaaggcccaggggctctcctgccctcttcccatggaatataactagcctgctcccctcccaaatgagacctgcagagggcatgccccaggcctcttagctcccaggttgggatatgctacagatcggccacaaactctgagcaaagacctggtgatctctaggggaggggagaggtggagaaacagcgcagggagaagccagttgacgctgagactactcgtgctgccagttcctgatgcaccctctccactgaccacaccagccctcaggaggccaggcctgggaggatcggccccgcaagaggctaatgacacagtccaggccagctaaccacatgctcggctgccacccccaccagccccttgaatgacacagtccacgccagctaaccacgtgctcggctgccacccccaccagccccttgaatgcctccagctttttggagtggcccttggggtctcctgggctcgtgtagggcagcatagaattgctgagggtcccagagtgggttccaaagtcaacgtggaactgcgtggcacggagcaggccttgttccgtgcaggtgctcatgcacctcccagcttatgggggtgactccagtctgagcatctcggcagaggtgtgcagagccgctgccttttgggaaaggccagctggacccctagtgtcccgccacagatgggggccctggccaggagggagcctctgtgcagcctgtgccctgcaggagcactgaccttctctccctcccctccctgcacagggtggatctttggcgagcgtctgcacgaccaggagagaggctggttccccagctccatgactgaggagatcttgaatcccaagatccggtcccagaacctcaaggaatgtttccgtgtccacaagatggatgaccctcagcgcagccagaacaaggaccgcaggaagctgggcagccggaatcggcaatgacccccacccagggggccagcgggagcagggcctgcatgagaccccgacagaaggtgggggggggggcctctgggaagcacaggccagcacctccccaggtggcaggatctggcttggggtgcccggccctcatccctgcccacgcagtgagtgctcatgtgtcttggccccttgcttgcaaactggataaagggtgcccaagcctctcctgatgcatttgtaaacaagaaggtttcagcagtattacaccacctccctcatgcctccgagggggtggaagggggtgggcacactccagggccccccatgcccctggcccccagggactggaagaggctcccaacccagagtgtccctgtgggaggcaggcagaaggtgacaattgacacgatttcctgcacgcgtcctcctctaccttggaagcagttagaatctaccaggcacagatgaggccgcccttgcctgacggagcttgatgagcagcccttggtctccggttccaggactgagagcccagctgcctctgcccacccttccccaggcctctgccagcctctggctgcacggtcaggccctgccccatggcaggcctgccagagcttggctggggacccctcccgcctctggctccctgatgggctggatgtaacttgtgtcttctagccgcttaaggagcccaggtgttttaaggaatgaattggtcactgcatcttgtatcgattatggttctgagaaaagcaaatatcacttttggctgcattaaaagaagcatcatatat

SEQ ID NO: 76 - DNA, 6957 bp, Homo sapiens
cacggcgcctcccacgttccccgcactcacccccggcttcccgggcatcttccctccatccttgtacccccggccgcctctgctacctcccacaccgctgctcaagagccccctgaaccacacccaggacgccaagctccccagtcccctggggaacccagccctgcccctggtctccgccgtcagcaacagcagccagggcacgacggcagctgcggggcccgaggagaagttcgagagccgcctggaggactcctgtgtggagaagctgaagaccaggagcagcgacatgtcggacggcagtgactttgaggacgtcaacaccaccacggggaccgacctggacacgaccacggggacgggctcggacctggacagcgacgtggacagcgaccttgacaaggacaagggcaagggcaagtccgccgagggccagcccaagtttgggggcggcttggcgcccccgggggccccgaacagcgtggccgaggtgcctgtcttctattcccagcactcattcttcccgccacccgacgagcagctgctgactgcaacgggcgccgccggggactccatcaaggccatcgcatccattgccgagaagtactttggccccggcttcatggggatgcaggagaagaagctgggctcgctcccctaccactcggcgttccccttccagttcctgcccaacttcccccactccctttaccccttcacggaccgagccctcgcccacaacttgctggtcaaggccgagccaaagtcaccccgggacgccctcaaggtgggcggccccagtgccgagtgcccctttgatctcaccaccaagcccaaagacgtgaagcccatcctgcccatgcccaagggcccctcggcccccgcatccggcgaggagcagccgctggacctgagcatcggcagccgggcccgtgccagccaaaacggcggcgggcgggagccccgcaagaaccacgtctatggggaacgcaagctgggcgccggcgaggggctgccccaggtgtgcccggcgcggatgccccagcagcccccgctccactacgccaagccctcgcccttcttcatggaccccatctacagggtagaaaagcggaaggtcacagaccccgtgggagccctgaaggagaagtacctgcggccgtccccgctgctcttccacccccagatgtcagccatagagaccatgacagagaagctggagagctttgcagccatgaaggcggactcgggcagctccctgcagcccctcccccaccaccccttcaacttccggtccccacccccaacgctctccgaccccatcctcaggaagggcaaggagcgatacacgtgcaggtactgtgggaagatcttccccagatcagccaatctcaccagacacctgaggacgcacactggggagcagccgtacaggtgtaagtactgcgaccgctccttcagcatctcttcgaacctccagcggcacgtccggaacatccacaacaaggagaagcctttcaagtgccacctgtgcaaccgctgcttcgggcagcagaccaacctggaccggcacctcaagaagcacgagcacgagaacgcaccagtgagccagcaccccggggtcctcacgaaccacctggggaccagcgcgtcctctcccacctcagagtcggacaaccacgcacttttagacgagaaagaagactcttatttctcggaaatcagaaactttattgccaatagtgagatgaaccaagcatcaacgcgaacagagaaacgggcggacatgcagatcgtggacggcagtgcccagtgtccaggcctagccagtgagaagcaggaggacgtggaggaggaggacgacgatgacctggaggaggacgatgaggacagcctggccgggaagtcgcaggatgacaccgtgtcccccgcacccgagccccaggccgcctacgaggatgaggaggatgaggagccagccgcctccctggccgtgggctttgaccacacccgaaggcatatgcaatgatgctgtccctttccgaagacactcctctccacaccccctcccagggttctctggacgcttggttgaaggtcactggagccacgtcggagtctggagcatttcaccccatcaaccacctctgacgggctgggcagccgggggccggtggccagagcgagggcaccagccacgaaggacggaggcgggcggggccccggagaaccctgtccctgcgtgtggccactcctcagcatcctccccacccaccatggttcattccgacttttccaatggaaactcagatcccaaaagtccctaaagcagtcgtagagtctcaccatctccaaggattggtcttgagaacactgttcagtgacggccatgcaggtggccgtccaaagacagccaacggagctgcctcgcagaatcagccagtgggcaggtggacgctctgctgagacagaagctggtggccactgccgggtgcccgcgtggggtcgcggaagggaatggatagactggtgtgctcaaaagagagagatcactcaaatgatttttataatgaaatgacaagaataacccttttggtaaccgtattgactgcagagtctatttaagcatgtggttttaaaaatagacagtattttttaaaaatcaaaaaatgacttgcaaattgttttttaaaagtaattttgcattgctttgaaatttgagctcatttgcaaacccgagtctgcctgggaacccgcactgtgcctgggtgtattctttatactgtagataatggagaaattttctatctctgtccctatttgtataagccaaggtgatgctgggtgccccgaggcagaacaagaggcgcggggccacacccgtgaaccatgcagacggccgaagaagtcttaggcagggcgccctgggctgcaggcctgcccgaggctgggatgggaagtgtgcctgccctcgtgtgacatggaattggtgtcaggaccgccacgtggccttcagaggaatccacaggtccccacccaagatccctcaattatatggggaagtcgagggcctgtggcttggatccgccatgcagagatgtggccgggcacccatcttccttccctcctctgtccctgcctcggccaccccacgcgggaacccagcgccgtcctctgaaggcagggccttggccacgtcctgggtctcccacctcccacctgaccccagcggctccggtgtcctccacgtggctgccctggggagcaatcccagcggatcgctccgggccaccaagccgcacctgtgcctgagactccggatggacgacacagtcgtcacgtcgctcttcctgcgggttcttggcgagacacagcttgagaacagaagggcgtcgggggaacctgccgcaaggagcagagacagcacagccccccgggcccagccgcctccctctcttgggacgcaacttcttccccactcggatgggctttaaattattcccataggggccaatttcaaataataatttttttccctgatggaatttaccttaatctgtatataacttgtaattttttctaattcatttcttttcttattttatttcctccttaacagtatttttggcattagacattcttattgtgaagaaataatgttaatataagtatctggtgaaggaccaaaaccgtgtgataaggttgtgtgtcgtgtgggagtggggcgattttttatgtgccaaatacccccgtcccccccatgaatcctgctgtccctgctgccgtttaccagacaatcatatgtttttgttaaatttgcgtttcagttacatttgcatttaagacaagtgttctatttatttcttgtattgtttggaagaaaaaatgatgatagagtcccaaaaagaagagaaaaaaaatgcccaagttgccctttaaaaaaaaagagcgtaaatacaaacaggagtggtgcaagccgccttggtgtgggtttgtgtcacgcgtggacatctcctcaggctttgtgtcacgcgtggacatctcctcaggctgtccccagcggtgacgggaggtgtcctggctgctccaggacaaaagacaatcgtctctgtgggtgccgggcggtccaggcttgcactgaagacgtgccacggggaggctcctgcaggaggctcaacccgacggatcacagtgaaagggattcctcccacgccagatctgcacaacgaggcaagacaggacccacctgtgcgtgcgctggggccatggggtggcccccccggggcagcgggggagctgcctgcagaagagccagccggcgtgtcgggaaggatccaggatctgcaaacacaaccgctcaggccttctcacgcgtttccacaacatcccctgggtcagacccaccaggtaccccgtaggaatttccagtttcccttgatctagatgggattcttataaaaattcaacctcagacataaacaccccatttctgtaaacccaaattatatggtttcttctgcgaaagagtaaggtgtgtgcttttttttttgcaatatggccccgtctctctgaagtgggacattcggacggatggagccctcagcgtgtcttttcagcaggagcagaaccgatgagagccgcccttaccgttggtctccggatcccccagtcccatcccgccgttttcggctgtcttcctaaccgtcctgtcttctcttggcgctctttccttccacctttcccaagagtcctggttgcacgttttaagtcatatattttcgtccccctgaaaatgatggcaagcccagtttctcctgagcattcagacccccaggccccagcacttggcgttttcaggaggccctgttcttagagcccctgacaaaggcagcacttatttcctgggctggtgcgccccaaaacacggccccgacacttagtgtggccccaggccccagcgagcctcgccctcccagttttgctctgcccagcagtgttggtgcccagagatgacaagggccagggagcctggcccgggtgtgagaattcagagattctggcctccagctgtcaccacaccgtaacggggccatgtaactgtgcagcatggacagggatgcgacggggcagctggctgtgtccatggccaggtggccagggtcagggctgcaagccaggggtccagggcccttccgttcagcccaaatgctgccccaatgctaactccttggattgtcaacccccatcccccaaatggaaattccgaaggaggcctcctcgcacctgccctccgctgctcctcagaccccagcccccagcgagccgacgtccccacccgttcctgctctcatccccaggttgggcacgtggggttcctcctctgtgggcctggcagacccttcatgagtgggacccaagatatcactgacttcaacccagaggatcgagcccctgcaccctgcctggggccctggggtgtggagcagtggctggggtgggcgtggtgtggcctgagagactgcccagctggagaggccttcctttacaaggccacgcgtgcagctgtcccatccagaccccgactggccaagacctccacgtccccagagtccagccctggaaattccaagggccctggcgtcctctgccttccccgcttccccgtgagcgtctgcaaaacacttgcctgaatacatatcacgtattttagactcgaagcctcgaagcactggattgtggtcccctgccccctctgtcccgtccccctgcccaagtgactgaaacctactgagctatattcactgtgctgtcctagggggagggagagcagagctcgcccctgcactgcagccttgtgggggagggcaaggctctcctcccagccagggacgccaggacatagctgctcctggtcagtggaggtcagccgggtatcaaaagccatgaaactgtgtctctgtagcaatgagtgatactgtgacaaaaccatccttgcattcttcctagaagagttcctctgctccttccattccatttttgtgtttgttttgttcttttctgtcactgatccgtattaccacttttggaaaaaaataaataaataaataaataaaaggcagcttgagtttccaaacgtgtgattcacttgtgaacaaaagtcattctaacaattgccttcagcgtcacgtgcattgccactgcgctttcggcacgagggatgctgagccctggtgtcagagtcgtaatttaaagcgtgtgtgtatatggactttgtcccttaaggtcgatataaagaatcctcgcagaatcacagacctgtgccgcccgccaccttctgccattgttacattacagatttggtttagtttcgttttgttttgttttttctcttagaactgtatagtattgaaaaagaaatcaaatgtaaatgtctggttttcatataatgtttaaaaagaccattgagaaggaggctggcgctcgccccatgtcccccttgattgtaaattgcttctgttctgtttataagtaaactgtgcatgactcctgcttagcggtcattatcgtgtctgttggtgaaatttttattaaaaggaaaattctgtagatgcacttattgaatatgtgattaggatctacgtctgagactaggagtcctgaactgctgacgcgaaagaggcgcagttcccaattaatacggaaatcgctgtgggagaagaatgaaataagacgtgaagtgtaggaaatcatgaaaagaacaattttgcaaattgcattctgatgcttgtgatgaacacaaatgtacttgtgtagagacatttccttaagagaaagcctaggagaagccgatttggaggttaatgctgtagaataggactgtataccaaatgtaatctttccaatgctccaatgaatttatacatgagattgatatgcaataaatctgtgtgcttttct

SEQ ID NO: 77 - DNA, 5956 bp, Homo sapiens
ccgacatcggttggattacaggacacagctacgtggtgtatgggcctctctgcaatggtgccaccagcgtcctttttgagagcaccccagtttatcccaatgctggtcggtactgggagacagtagagaggttgaagatcaatcagttctatggcgccccaacggctgtccggctgttgctgaaatacggtgatgcctgggtgaagaagtatgatcgctcctccctgcggaccctggggtcagtgggagagcccatcaactgtgaggcctgggagtggcttcacagggtggtgggggacagcaggtgcacgctggtggacacctggtggcagacagaaacaggtggcatctgcatcgcaccacggccctcggaagaaggggcggaaatcctccctgccatggcgatgaggcccttctttggcatcgtccccgtcctcatggatgagaagggcagcgtcgtggagggcagcaacgtctccggggccctgtgcatctcccaggcctggccgggcatggccaggaccatctatggcgaccaccagcgatttgtggacgcctacttcaaggcctacccaggctattacttcactggagacggggcttaccgaactgagggcggctattaccagatcacagggcggatggatgatgtcatcaacatcagtggccaccggctggggaccgcagagattgaggacgccatcgtgagcacaggctgggcctcctccttcactcctacacctccatgatgcccctgtggacctgcaagttggggtgggagtccctggcccgagtcacttctagcacccggggccgccacattttgcccttttgttctctgttgtacacaggccgaccaccctgcagtaccagaaagtgctgtcattggctacccccacgacatcaaaggagaaggtgagtgtcctggagatgagctcctccctgattcctgaccccacacccattatgggcacctctgtacgaggagcagactctggagagtggagtgataggggatactgtgggccaagctctcagtgttcttctctctcaagtggaaactgtaggggaggaggctgaatagcactcgtgttcggtcgggtttctgaaatgccctggttctgctgtcctttcaggacacacatccacagtggccatgacccagttgggcttggctaagcttggggggtttccccttctgtccatggtgtatctggtggggacaccgtccagccccattacagagagtttatgagaaaatgtccagcctcatgtatcctcacgggcttggtcatagcactcaagccagctctgcagccgccacgcgtgtgtgccagagtgtgctctggagtgtgcaggctgtgtgctgcgctgggactctttggacgaatctgacctgtggttcccactgcacagcgacatgctgggggaatgcagaatgagggactagaatggcctttaccaaggccacgctttgtttcgagtctgccagcttcttggtggctgggtctgggaaggggcgggagcacctaggtgttgcaatgccaggtccatccaggcacactgcctggcctggcgtgacctggacacacactgaccccatgccagggcactgctgggcagactggcttctcctgccctgcccagtggcttggggtcaggcttgccctcccgctgggaggccaccctgtgtcacagtgtgtcccagatgtcaccttcctccctgcacttctatgtgccgttattccattatttacttaaatgctctctttaaattgacgcattgcaagattgagaatttgtttcagtgctttacaaacagcattttcagttgccatggaaaggctatgctggtaaggctgggatgtgggagagagctggtagggacccctgcccggtgacatgtccagatgtgatcaggagggtcagagaggacggagacgaggacagtttctcaggtgtgactagggtaacttagtgcccccctgaggttacctcgctctggcaggagcctgggcccctcctctgaggactcctgcatttcacatctctgggctgggggtccacagggcactgacgtgtcctgggatttgaaagccccatctatgtctgagtccagtggctgagccagtactccctggggccactgagaggggtccgggcatggtccactgtgtctggggattcagcagcccctggattgaactccataaagcaagtgcaagatcaaggaaaggacaatggaagtgacctttagacaaacgtttgggcatcacaatcactgtctttcatagggtggcctagccttaggtctgttggggtggtgttggggcatggtctgctgtggacgctgctgcccagggcacgttctgcgtgtgtggagctattgcaagtctggtgttgccaggcttcttaatgtctgccagatgtgtggggataatttgtctatcatgtgtatgatgatgtgcattttcctgatttctaatgaatttgagtatccattctataattatgaagagctgatgaacagctcttggttggctctaaagctgcctgtgaatatcgtatatttgtccccactctctctgttttgcagcagctctgaaaaagggcagcccctggaccttgtctaggacctagacccagcaagcctctggtgctgctggccaggctcttgtctctcttgtctccagtgtcctgagccttgcctgcctcgtcctggctcttaactggctcctccacccatgtggaaggtttcctccctccagctccatcctcagaactcaacagtccaggcccacttctgatcccatatcaacgaccaagatgagaaaaacggtgttctttccctcaaagatctaacagcctagtggggtggcagcagggggactgacagctgttcccacatagcatgtgccataaactagattcatgggtggagtcaggaaaggcttcacagagcaggaggtggctgaactgagtcttgagggatgaataggagttcgccacatggatataggaaggcctttcaggcaaaggctgtaggtctttacagatcatagcttgttcagaaaaccaatcatccattcatgcacttaacaaccatgtgttgagcacctcctgtgttccaggcatggttctagatgctggggacacagcagtgagtgagaaggtctctgaccccatagaggggtcaagagtagaggagagagacagacaaagagcaagaaagatgatcaccaaggaaacgacacagtcagttaggtgctacatgccagggaagaatgggtgaaggtggcatggggctggggcagatgagcagtaggagagccacacatatatagaagcttcgagggagagacagagcacctcacaggccagtggggacgggcaggctatcagggatggcaccgggatgagcaactccttatatggacaacaatcaaattagatccctcttcacagtgtgaactcttcctggaacatgccagggtactgaaaaacgaaagctagtatttatgctataatgtgggctggcccgtgctgcccagcagaactctcagctgcctctcagctgtctgtgttgtccagggtggcagcctctggctgctcatggtgctgaatggcacttgaagtgtggctcatgcagccagggagctgctgatttaattgaactgaaatagctaccctggcccatggcaccatgttgcacacacacccccaaaggctggtggtgcccatttgctgtgcatctgtgcaccttctcatggaagtctcattccatcaaaccacattatgggttatttcacagatgtgtacacagagaggggaggtcccatgtcccaggtcacacgcagccagtcagcattagagctgagatgccaagctctcagccacacatgtgcactcacctggaacatctgtggagctgttagaatcgctgccacttttcatgaaactgaagtgcatctttgggtttgcaactaaagaaaccagctgctacaatgtcactaacataggattcaaaagcccttcggatttctggcagtctgtgcatagcaccctgcctcgggagttggctccttgtctagtatttaatacatccccaaacttggctttattttcagctgcctttgccttcattgtggtgaaagatagtgcgggtgactcagatgtggtggtgcaggagctcaagtccatggtggccaccaagatcgccaaatatgctgtgcctgatgagatcctggtggtgaaacgtcttccaaaaaccaggtctgggaaggtcatgcggcggctcctgaggaagatcatcactagtgaggcccaggagctgggagacactaccaccttggaggaccccagcatcatcgcagagatcctgagtgtctaccagaagtgcaaggacaagcaggctgctgctaagtgagctggcaccttgtggggctcttgggatgggcgggcacccaagccctggcttgtccttcccagaaggtacccctgaggttggcgtcttcctacgtcccagaagcagcccccaccccacacatgacccacaccgccctcacgtgaagctgggctgagagccctttctcccatccattggaggtcccaggagtgtcacccatggagaggctatgcgacatggctagggctggttctgccatctgagtttggtttcctggaatgaaaaggcattgccatctccattcctctgccctcttgagccagcacaggaaggtgaggccctgggatagcgcgcctgctcagataacacagagctagttagctagtagcaaccgtgttttctccagatctgtctagatacaaaggtcagaaatcttatttttatacttttatattgtggaagaacagcatgcaacactcacatgtagtgtgtggatttacttgaacatgttctttttaacatgtagttatgaaaatctccttttttgcctctactggtgaggaaacatgaggatcagaggccacatttttaattattgttagtgtatttggaagtctgaattggagatgtttgtacctctgtctaaacagttcccttgagaacttccaagcctccggcatcttttcctggtgagtgtttctcctgtgcttggttgtgtataatggagctaactcctaagcggtggggtgaatgtggccgccttagttctgaagctactccagttatgttctgtttcttcaagctgtgatccagaaagatttttgtgcccccagatgcctcttgataggagaggcaacatactccaaatagttgggttcttcagggaagctattagaaactcaggtgacttgttagagcactaacttggtcagagccaaatcctggcaaacgctgcctgaccttcactctgtggttggggcagtgagaaccactgaggtccaatgatgagacttggaggtctggatccagtctctctttgttttaatgtgacttaggtgctgtcaacattagcaagataatggaaatcacgacgccagtgggtgcttacctccctgctaggcatgcaggggctggcggttggcaggggaaggaggcccagtgagccgggtcccttaggggagggagagtttgtcctctttgccccacagtctacccttcagggccttgtggcagtgccagtgttcggggggtgtctgggccactgagtacccactcggtcgtggttgtgctggcctcttgggtgagtgaacctgtgaagcccaggaggtggtgttggctgcagggtacacaaatactgagtggtggtcttttgttacaggcttagcaacaaagctgtgccctgggcatggggggctgtagtgtagctacagttgtgcgtttgtgaaatggcttagctttccatgttgctgagaggaacctggacatggtcccgggcatctgaatgatctgtaggggagggagttcaaataaagctttattttgttcattttc

SEQ ID NO: 78 - DNA, 5868 bp, Homo sapiens
gaattatctgggtccagagcaaaggtggcactctcagccctccctggagtccacgccggcaggtgaaggatcagagccccatgccccatccttggggccaggggctgggacccaggtcaccaggagcctccagttgaagtggggaggtgactggggtggtgcagtagtgagccatcccctcacacactgccagccttgcccactgtgtcctccctggccgcccggagctgtgtccgcctcctgcctggctgcctgtgctcggcccctccacaagcccaaaacagccctagggtactcagtgttttcagagccgcctagatgcaggactgtttgtgttttggttttaaatttttttaattaatttattttttatagagaccaggtctcaccatgttgcccaggctggtttcaaacccctgggctcaagtgacctgcccgccgcagcctcccaaagtgctgggattacaggtttgagctactgcacgccactggttttaaatttttaaacagaaaacaatatttacatttcctctgtctttttttttttttttttttttgagacggagtctcgctctgtcacccaggctggagtacagtggcgcgatctctgctcactgcaagctccgcctcctgggttcatgccattctcctgcctcagccttctcgtcttttaaaactgaacactgaggtgggttttgtggtggttggtgaacggacaggtttgggcctggatcccccacccgaccctagcacccacaggtggggtcgccaactctgctgatgtgcctcctccctcagcactgtggacctgctggactggagcagcctcatcgacagcaggaccaagctgtccaagcacctggtagtccccaatggacaggtaacacctccgctcctcagtgaggcccagctcagcagggcgctgcgctaagaagggaattcagcctgccacatgtttctcttgttgcctaccctgggaacttaacatgaccaagatcactgcacactatggccccacagaccccctatggtccagggggaaaagaagacaaacccactagtgtccacagagtgcttggtgggacagagacccacgcggagccttaaaacaccacaaggagagggggtctgggggccttccccaagtcatctgtcttgtgcatcaggtcaccccaaacttcagaggcctaaaacggcagcagccactctgcttctgcctcatggttctggggttgacagggctcagctgggcagtcctcgcttggggtctcctgggtagctgtactcacagagtggtggcgctgggacctgggggaggcgcccactcacatgtctgggagttggtgctggctgtggcttgggctttttcccaacatggcagctgggctctaagggccagtgtcccctgagacgtgagagccaggcagaagctgggtgaccttttcctgcctcacctcagaagtcacacggtgtcttttctggcaagttctgtttgttagaagcatgtcaccaggccagcctgtatactgcggggagaggaatgagactcatctgcctgtgggaggggggcccaggacctggctgactgcttgaaaccacaacctaaactggaattcgaagaaagaacagaagcaccttcagaaaacatcctgcagaggcagctttccatgacacatctagccccagtccactaagggcccagcctcaaactcagagcccccgacccagagcctcggggcgcagtgcgtacagtgtggctgtgcaccaaggccaccagctgttggagactttagcatggtgtagcaagggatagagtggtactgcttgtgcccagtgaggcaaggctgctggggccagcaaaggggtgagcgggaggccctgcgggatgggtccccacggcctctgagcaccagctccttgaaggcctcatcctggcggttgccctggtccctggctacgtgtcagcacgtgctgcacaactgccctgtctgcctgtagccaggggtcttcctcctgggccctcttcctgctctgggtggagcccttctgtttgacgattgggtggtcagtgttcacttcctcagtgtcacatgggagctgcagggggccctcccacaatggtggggcctctgtgagaactggggaggctgttagagtacacacttcggagtgcaggcctggactgagcctggggcccactgacatgggcactgagctccctcctggtacccccagggcccgcgtagggcagtgcactggctgcgttggaggttccggggctctgtgctgcttgtccaggtggccctccctcccggccctgcatgagagggttcccgtgggctgggaacactaagagaggtttagcctgggcctcagggtggcacttcctggcccttgctgtggcctgaccatgtgctgtacccccagacaggacagctggagcccctgctgtcccggtttgctgaggaggaggagctacagatgacgaggatgctacagcggatggatgtcctgcccaaggcgagctgtcccgctcgggcagagggctggggccttggggacccgggactcatgcagaagagggcacctgcctcacttgagcaatagttgctcccactctcccaccccctgcgcctctcagaaagccacagagatgggcgtgcggctgatggtggatgccgagcagacctacttccagccggccatcagtcgcctgacgctggagatgcagcggaagttcaatgtggagaagctgctcatcttcaacacataccagtgctacctcaaggatgcctatgacaatgtgaccctggacatggagctggctcaccgtgagggctggtgttttggggccaagccggtgcggggcgcatacctggcccaggagcgagcctgtgcagcagagatcggatatgaggaccccatcaaccccatgtacgaggccaccaacaccatgtaccacaggtgcctggactacgtgctggaggagctgaagcacaacgccaaggccaaggtgatggtggcctcccacaatgaggacacagtgcgcttcgcactgcgcaggtaggtgtgccccaccctgcaccgaaaccccaacctgagccgttgtctcctccagctggggagaggtggcagcagtgcagagctcagggtgggcagagtgacctgctgggtggtcgggcatttgtggggaaaggctggtgaaatgagctggagggtggcttcagtgggcaggcccaggcccgctggcattctggacatcggactgtgagagcacaatggctctttgcagttacgttggtttttaaaattaacttttttttttagatagaatctcgctgtcacctatgctggagtgcagtggcgtggtctcagctcactgcaacctccgcttcccaagttcaagcaattcttcatgcctcagcctcccaagtagctgggattacaggcatgtgccaccacgcctggctaatgttttgtatttttagcagagacagggtttcaccatgttggccaggctggtctcaaactcctggcctcaagtgatcctcccttcttggcctcccaaagtgctgggattacaagcatcagccactgtacccagccttttaaaaattaacatttgacttattaaacttcacaattaaaaaactaaatttcatcagggtattcggatggctcctgaaaggtacaaatgtagtgttggagcccagtccctcaggaggcctccacagcgctgcctcatttataagcagttcccttaacattttaactacatctggaatgtaacggtttgttttctctttaaacatttgtcccatggagcacaacttcggtagaattctaacaagtcaaatgcagaagttaggtgaagtcagttcttggatactcctgtactgtcaccctggtcttatctcatgccttagcccaagctatgcacacaatggggtcctaggtccccctcccctcccagattccgccttcccagggatgggaccccctagaaccctcggaggcctgggcagtggcctcgctggctctcgccttcctaggagctgagcaggagctccactctcagcagggcagggtgccccagatccatgacttgtggcacgaaggggctccccaagaagctgtgaagccacagggccaggcttggggccagggctgcagccaacaggacacatcctggtgctgctcgggagctgactcacggctctgaaatcattcagtgatgtccacattcagcctttgtttacgatgctgctactttttcatggcctgaaattgcagcacacccatttttgtgccctgatcctctgctaattgtcatagatgtgtcggtgatgggacagactcactttctccacacgcacaggcctggtggccagcactgcccagcactcgggagctggtgggggttcctctcagcttgtaatcaggactcccagcctctgggtggactctcaatgctggtggactcacagcctgactagacacatcaccatccaactccgaaaggacagcccgccctcagcagggcttcctctctccagcttagccccggcacctgtctgtccctactatcttgctgtggcagtggcttccccagtggacacagcttccccctcccgagtggcagccgggctctctcctcttggccccaagggccctgtgccgggctcccccagtaccatgctcacatccctgcctgagaggctggacccctgcaggcttcagctctgcccctgctgtgggtggctggggagctctggggagctggggtcccctcccatgggtaagtggttctagactatggcagctgctctgtcctgtgctgggcccagactgccacaccacccaccctcaaacaacccgagttggctttggccaaggaacaaaccagccccaaacttagaggctggaacagtggcatgttctgtaggccaggggtgggctggctcagctgatgcttctgctgctggctgtgcctgtgtccctcctgcgtctgtgatctggggccggtggggcctaatgagctcattcatggctggtgtagtaaaggagactacatcctgggtccagcgtcccacaggccagcccaggcttgggcacgtggtgggctcaggcttccagaaggcctggagagggcaagcctctgcttgtgtcacctttggtacctccctgttggccaaagtgcctcacgaggccaagcccagatcccaggtggagtgagccactgtcctgtgctgggaggagccgcagtcacatggcagaggctgtgcacaccagcaggggagggggcagccagcagtggcacccggctctcgggttcatgtcctggggttgaggaagacacaagatggaagccagggcgatgtggcagagatgggtgcctgctttagactgggtggtcccgacactggagcccagcccagggatggagggaaagggcctctggccgatgggtactctgggagccagggctggggcagatggagaacaggggaggtgaggccctcggggagggagtgggaagcacagcacaggcactgccagtcacccgggtgatgcgtgagcagcaggcggaactcgccccaggctgggggacccagtgctgtgcagaccagcgaagtcgggatacctggatatagtaagctggagatgaaacttgagaactgtcactgcgtggatatttcaaaccctgagaatctttgtaagaccctatacggggtggtgtgaagacaggacagagtggaggccccaccccagtatctgagcagtgctaatagatgtataatgcaagccacatctgtaatttaaagttttttggtagctacgttaaaagataaaatgaatttcaagaat

SEQ ID NO: 79 - DNA, 5878 bp, Homo sapiens
caggtcggtggtacacatgctgttgcaggcgtgcaggtcggtggtgttacacactttcacgctgttgcagacgtgcaggtcggtgctgttacacacgctgttgcaggcgtgcaggtcggtggtgttacattcacacttgcaggcgtgcaggtcggtgttgttacacactcatgctgttgcaggcgtgcaggtcggtggtgttacattcacgctgttgcaggtgtgcaggtcggtggtgttacacacattcacgctgttgcaggcgtgtaggtcggtggtggtacacacattcatgctgttgcaggagtacaggtcggtggtgttacattcacacttgcaggcgtgcaggtcggtggttacattcacactgttgcaggcgtgcaggttggtgttacattcacacttgcaggcgtgcaggtcggtggtgttacacacattcatgctgttgcaggcgtgcaggtcggtggttacattcacactgttgcaggcgtgcaggttggtgttacacacattcacagttgcaggcgtgcaggtcagtggtgttacacactcacacttgcaggcgtgcaggtcggtggtgttacacacatgctgttgcaggcgtgcaggtcggtggtgttacacacattcactgttgcaggcgtgcaggtcggtggtgttacacattcacgctgttgcaggcgtgcaggtcggtggtgttacattcacgctgttgcagacgtgcaggtcagtgctgttacacacgctgttgcaggcgtgcaggttggtggtgttacattcacactgttgcaggcgtgcaggtcggtggtgttacacacattcatgctgttgcaggcgtgcaggtcagtgttacacacattcacgctgttgcaggcgtgcaggtcggtggtgttacacacattcacgctgttgcagatgtgcaggtcggtgctgttacattcacgctgttgcaagcgtgcaggtcggtggtgttacattcacgctgttgctggcgtgcaggtcggtggtgttacacacattcacactgttgcagacatgcaggtcggtgctgttacacacattcatgctgttgcaggcgtgcaggtcggtggtgttacattcacacttgcaggcgtgcaggtcggtggtgttacacacattcatgctgttgcaggcgtgcaggtcggtggtgttacacacattcacactgttgcaggcgtgcaggtcggtggtgttacattcatgctgttgcaggcgtgcaggtcagtggtgttacacattcacgctgttgcaggcgtgcaggtcggtggtgttacacacattcacgcttttgcaggcgtgcaggtcggtggtcttacattcatactgttgcaggcgtgcaggtcggtggtgttacattcacactgttgcaggcgtgcaggttggtgttacacacattcacacttgcaggcgtgcaggtcggtggtgttacacacatgctgttgcaggcgtgcaggtcggtggtgttacattcacactgttgcaggcgtgcaggtcggtggtacacacattcacactgttgcaggcgtgcaggtcggtggtgttacacacattcatggtgttgcaggcgtgcaggtcggtgttacacacatgctgttgcaggcgtgcaggtcggtggtacattcatgctgttgcaggcgtgcaggtcggtggtgttacacattttcacgctgttgcagacgtgcaggtcagtggtgttacattcatgctgttgcaggcgtgcaggtcggtggtgttacattcacgctggtgcaggcatgcaggtcggtggtgttacacacaacgctgttgcaggcgtgcaggtcagtggtacacacattcacgctattgcaggcgtgcaggccggtggtgttacattcacgctgttgcaggcgtgcaggttggtgttacacacattcacacttgcaggcgtgtgggtcggtggtgttacacacattcatgctgttgcaggcgtgcaggtcggtgttacacacattcacacttgcaggcgtgcaggtcggtggtgttacacacattcacactgttgcaggcgtgcaggtccgtggtgttacacacatgctgttgcaggcgtgcaggtcggtggtgttacattcacactgttgcaggtgtgcaggttggtgttacacacattcacactgttgcaggcttgcaggtcggtggtgttacacacattcacacttgcaggcgtgcaggtcagtggtgttacacacattcatgctgttgcaggcatgcaggtcggtagtgttacacattcatgctgttgcaggcgtgcaggtcggtggtgttgcacattcatgctgttgcaggcatgcaggtcggtggtgttacattcacgctgttgcaggagtacaggtcagtggtgttacacacattcatgctgttgtgcagctatcacttccatctccagagcccttttcatcttaaaactgaagctctcccatcacacagtgacccttcatgtccctccccagtccctgaaaaacactgttcaggtttttcttcctggacctcattgtgtggagttcctcgtgtgagtgcagtcacacacgatttgtccttttttttttttcgtttgttgagacagagtctcattctgtcactcaagctggagtgcagtggcgtgatctcagctcactgcaacctccactcccaggttcaagtgattctcctgcctcagcctcccaagtagctgggattacaggcgcctgccaccacgcccagctaatttttgtgtttttattagagacagggtttcaccaagttggccagactggtctcaaactcctgacctcgtgatccacccgcctgggcctcccacagtgctgggatgacaggcgtgagctaccacacccggctgatttatccttttatttgggctcctttcactcagcgtctttaagcttcatacgcgaaagatgcttcagagattcctttttcaggctgaatatctgctgcgtggctaggccactttttgtttaatcctctctcctctggtggacaccaggactgtgctgttttggttgctgtaagcgcgggtgcacacgcctgcctgaggctgtgttttggccgttgtgagtgtgggtgcacacacctgcctgaggctctgctttgttgtgagtgcgggtgcacacacctgcctgaggctgtgttttgggtgttgtgagtgtgggtgcacacacctgcctgaggctgtgttttgggtgttgtgagtgtgggtgcacacacctgcctgaggctgtggcgcgatctcggctcactgcaacctccacctcccgggttcaagcgattctcctgcctcagcctcccgagtagctgggaccacacccaccaccacaccccgttatttttttgtatttttagtagagatggggttttgccatgttggccaggatggtctggaactgacctcaggtgatccacccactggcctcccaaagtgctgggattacaggtgtgagccactgtgcccggcctctttttactttgttaatggtgtattttgatagataacagattgtcattttcatgaagcacagctggtcagtttattgttgctcatgtatttggcctcatgttcgagtccctgtttttaatcatgagctggacacagccctctttagagcaactgtgaccacttgtggtgagaagtgcagcccacaccatccacgtgaggctcccatgcagacatttagaaggcgttttcactgcagctcagaaaatggccccaggcccccatgggcacccccatgtcaccagggcctctggttgctgccggtacacagggataggcagccaggcctcgaaggtgctgggcatgggtttgggtgtctgcgttgggtagagacccggagcgcccttgctgggcgtgccctaacatcccggtaccctgtgcccctctgtgggccaggacgcctggtgctgccagctgggcgtaagccctgaggagctgagggtggctgtgatttggaggatgagtaggagctcaccaggagggcgtggagccgaggcgtttaatatcatcaggagcaacactgggctcagaaggcaggcacacttgccgtccctccagagccatggctgacggccaggcctggtgggctctcgtgaggacagtgcctgtggttgtcagatgctgtcccttcgagtaagggatgagagccatcctgaagatgggtcagctctgtggtgaccacccgttgggagcagtgacattcaggtgcgttgcactggtggctgtgtggctgtgtggtacggccaccaggagccatgtgggcaaggacagctgtgggctgggcacagagctctctctgctgggagtcagtcggtgctggggcgaggggaggcagagctcacagagcccctctacagctcaccctgcagctcggccctggccagtaaacccaccatccccctttctgccgcaggaggcagtggagaaggtgacacagcacatccacggcctgtctgggaagaaggatgggctggtgcccatgttcatcaatacccacagtggcctcttcacccacctgggcgtattcacgctgggcgccagggccgacagctactatgagtacctgctgaagcagtggatccagggcgggaagcaggagacacagctgctggaagactacgtggaagccatcgagggtgtcagaacgcacctgctgcggcactccgagcccagtaagctcacctttgtgggggagcttgcccacggccgcttcagtgccaagatggaccacctggtgtgcttcctgccagggacgctggctctgggcgtctaccacggcctgcccgccagccacatggagctggcccaggagctcatggagacttgttaccagatgaaccggcagatggagacggggctgagtcccgagatcgtgcacttcaacctttacccccagccgggccgtcgggacgtggaggtcaagccagcagacaggcacaacctgctgcggccagagaccgtggagagcctgttctacctgtaccgcgtcacaggggaccgcaaataccaggactggggctgggagattctgcagagcttcagccgattcacacgggtcccctcgggtggctattcttccatcaacaatgtccaggatcctcagaagcccgagcctagggacaagatggagagcttcttcctgggggagacgctcaagtatctgttcttgctcttctccgatgacccaaacctgctcagcctggacgcctacgtgttcaacaccgaagcccaccctctgcctatctggacccctgcctagggtggatggctgctggtgtggggacttcgggtgggcagaggcaccttgctgggtctgtggcattttccaagggcccacgtagcaccggcaaccgccaagtggcccaggctctgaactggctctgggctcctcctcgtctctgctttaatcaggacaccgtgaggacaagtgaggccgtcagtcttggtgtgatgcggggtgggctgggccgctggagcctccgcctgcttcctccagaagacacgaatcatgactcacgattgctgaagcctgagcaggtctctgtgggccgaccagaggggggcttcgaggtggtccctggtactggggtgaccgagtggacagcccagggtgcagctctgcccgggctcgtgaagcctcaggtgtccccaatccaagggtctggaggggctgccgtgactccagaggcctgaggctccagggctggctctggtgtttacaagctggactcagggatcctcctggccgccccgcagggggcttggagggctggacggcaagtccgtctagctcacgggcccctccagtggaatgggtcttttcggtggagataaaagttgatttgctct

SEQ ID NO: 80 - DNA, 4973 bp, Homo sapiens
gcccagccggacactgcgccaggccagccacgagtccattgaggacagcatgaacagctatggctcagagggcaaccttaactatggaggagtttgcctggcgtcggacgcccagttcagtgacttcctgggaagcatggggccggcacagtttgtgggccgccagaccctggccaccacacccatgggggatgtggagatcggtctgcaggagcggaacggtcagttggaggtggacattatccaggctcggggactgacagccaagccaggctccaagacactgccagcggcctacatcaaggcctacctgctagagaatggcatctgcattgccaagaagaagaccaaagtcgctcgcaagtcgctggacccactgtataaccaggtgctgctgtttcctgagagtccccagggcaaagtcctccaggtgatcgtgtgggggaactacgggcggatggagcggaagcagttcatgggtgtggctcgcgtgctgctggaggagctggacttgaccaccctggccgtgggctggtacaagctcttccccacctcctccatggtggacccagccacaggccccctgctccggcaggcatcccagttgtccctcgagagcaccgtggggccctgcggagaacgatcttagtgctggaatggggaggggctccccaagatggcctggagaccacccagccctgacctgggaccccaggcccaggggcacattgaacaggaggacggggctctcccccacagtggggaagcagaacggggagacctgcccccccttgggcccctcctcaccccttctttgcctcctacccccgagacctcccctctcccaacgggattggctacacttttgacttggccggttcttgacctggtggatgtggctgcagtccagagaaaggaaagattgaggtggcagagcagaccactctcccttcccaaactgtccaacttctccccctttttgcctcctcggaagctcgctgcccagagccatgtccagaacccagccggccatctccatggtgccaattaccagcaagtgtctttcctgcggcaccgggttcaggcagctactcctgccccagagatgaaggggcagctttgcaaggatccggagccagctcccaggggcccagagccccccacttgaagaggagcttgagcttccctctgcctgcccgtggaaggagctttgccgcagcctgtccgagtccatccgtccgtcccctcctgcctgcccctcttctggtggctctaggaattggggttcagcagggaccaaaggaaaggaggaggtgccgggggcctggcacagacccctaggtgcctcgctccatgggattgcaacaagctagtttaggaaccgctggcggactagaaagaatgttgtcgtctgtgttccggtggaggagctgtggaacctgagtttccagaaccccaaccctagagagcatttgggggtgctgtattggagggggaggctaaggaaagttgggattgggactggtggtgccaagataagggtttctcaaattggagaacccctccttgttgcatgaggtcaatggtcatcttgtctacccaccctgcctccaggccagggggctggggaggcaaatagagcccccctattttagtctttttaaaaaaaacatcctatactaagggcagaacccactgccccggcctcaattaccttggctgaaggaaagatggcggtaggagagaaaagtgaagaggcgtgagtgtaagaactgggagattccttttccagcaggcctgggtagctgccttcccagcccagccctccctggggcctgcgggagcccttttgcatgcaagggaggatggaggctggcccctctttatagaagcacatttctgccacctcccctgggaggcacccagaagcctgccactctttacctagtccctgctgtgtagggcgtagtccaggttagctaggtagagttagtgctccaagccctggggcctgttcttagctcatgcatagtccttacagagtcccaggaccgggggtggagaggagcctcaagtacattccaggagaccactgtctcctcgctggcctgggcctagatggggcagcctggctcacaggaggccagcccctcctcctccgcccccttccttcccttgtccccgtagggttatagctggagctgcctgttatactcggctgttctgatttattattcttggtactgactttctttatgagggactcctaagggttgtaggaccttggcagagggggcctggtctccattagagggtgttgttttctcctgaggacacccaggctgcctttggtcccaccctgttcctggtcccggtcccggtcccagtcccaccaggcaactccttccacccggaaattcttcccttcccttagcctgtggaaaccctgggtattctttaaagttctggtcaatgtatatcacctccacagagctgcttaccctgcactgggaaggggagatggagacgccccctttacccaggaggtcttcagagtttcctgggaccgcggtgggtggaatcccaaggctgggggtggaaggagcagggctctggagggattcgcattcaaggcacagaattggccccttgcctgtttgtttttctaaccagtgtgatttctctgctgttcgtttattacttaccattggaatattttgagccaggagagcgccttctctctccagccatcaccgctgtggttgttcaggggtagcttttcaaaaacagggcagagcctggctgtcccaaccagggggagcaggggcttggccctgacagcctgagcccttcccctggtgtctgcacagcctttataaagagagagagagctccgaagcaataacaacacctgggggtggtcagtgagggccccctcaatgattttcttgtttgttctgtgaaatcccgctcacctcctggaggggtggagcagctgggggctggagccctgtttctttgtgtcatcgtgagcatgtgccccttcccaggggctgtgaccattgggtgtgggaactacggtctgtcctcaccaagggatgggggtttggggaggagagtgacattttcatcattagcttcggagaagcttcaagcccatcctgtccccgctactgcctggccccttgctgactcaggctgcactgtttgaagaggagcagagaggctggcactaggggccactggggggctggggtctccaggggatgactgttttcaatctctgggccaagatcacatgcaggataccacgggaaggagccatctccactctccttctccagaacccccttgaagggcctttgggaccattagtccatttccattttacagacaaggaaatcaagacccagcttgggggaaaagccacccctggagtcacctgtgtgttcagtggcacccccagcctgggtcccctcctcccaatagaggctgagccggagccagggcagtatgaggtggggctgccactgcccatacctcctcctcccttctttctttgaagcctaatggccccccaaaagatgggcaggacaagctgtagcccatctgagaggttgggaaactgaggcccagaaacaggaagtgactcacacaagacccctcagcaagggtgcaaagggggaagaactaggggctccattgttcttcaggcgacaggagaccgttgctccagtgcatgtctgctgggacaaggattcctggcctcgaagccctgggctgcacagccctactgggctccacctctataaaccagtgacttctctgggcctgggtctgggggagagggttgccagggagactcagctctccttgggggctggcccagctgactgagggtacacaggattgggtctagaccttgatgcctgggtggagggcccttgtaaggggccatagcctcttcaggaccaactggagggagagttaggaaacaccagctcctgcctggggcagtgagggaatgggagcagctgtgggcgcctcatttcaggcaagtcctccccaaaccttcagatgcagtgagacctggccttcctgttgtgcttttcagactttgttttcagaatgcttttatctcgagtgtgcccttcggccctcacaagagcccctggggagtaggtggtggcctgtgccgtcatccccatttcaaagcagggagctgaggtcctgggaggggaaagtgcttgcctgaggtcccactgtgttagtgggtgggcaggactggaactcggttctccaacagcccagagctcactcttttacacccagaggtggagcaggtggcttagggggtggttatgtacttcacaagccaattcccttcagccaggagctcctgggtgcatttccgtgtcagaaacagtaccgagtcccaccccctctggaggcacagctgttgcgtcaggcaaggtcacctgcatttatttattgagcagcagtgctgtgtcaggcccagggaccgagcccctctccctgttcccctatggtgtctccgaggccctctgggagggccccacatctggagcagcacctcagagtggacagaaagcattagcgtccacgagctcacccgacgccgagcctgtgaggtgggctgatggtgcccgtctaacccagcgcttcagggaggtcagaatggagccgaacccagggctgtgagcatcacctctggagccctttcactttatgactgcttcctggacgggtggtgggaaggcaggagcctgggtccttaggctgggggcctctctccatccacccacctttccctcattccctctcttggagcagcagccgcccaggcctttagggagggagggtttctggggcccttgggttggagtggggtcgcgttgcattgtgttcatgaccatgtagctcatgttgaaattaaagtttttggcttttct

SEQ ID NO: 81 - DNA, 5223 bp, Homo sapiens
cgcctggcactctcacccgaagacaagcccatccgcttgtccccctccaagatcacagagccgctgcgggagggcccggaggaagaaccgctggctgagcgggaggtgaaggcagaggtggaggacatggacgagggccccacagagctgccgcctctggagtcgccgctgccactgcccgccgcggaagccatggctacccccagccctgcagggggttgtggaggtggcctgttggaggcccaggcgctgagtgccaccgggcagagctgcgcagagccctctgagtgtccagactttgtggaggggcctgaaccacgggtggattccccgggccggacagaaccctgcaccgccgccctggacctgggggtgcagctgacacccgagacactggtggaggccaaggaggagccggtggaggtgcctgtgggggtgcccgtggtggaggcagtgcccgaggaaggcctggcgcaggtggcaccgagcgagtcccagcccaccctagaaatgtcagactgtgacgtgcccgccggggagggacagtgcccgagcctggagccccaagaggccgtgcctgtactcggcagcacctgcttcctggaagaggcaagctctgaccagttcctgcccagtctggaggacccactggctggcatgaacgccctggcggcagctgcggagctgccccaggccaggcctctgccctccccgggtgctgctggagcccaggccttggagaagctggaagcagccgagagccttgtcttggagcagagcttcctgcatggcatcaccctgctaagtgagatcgcagagctggagctggagaggaggagccaagagatgggaggtgcggagcgggccctggtggcgcggccctccctggagagtctgctggcagctggcagccacatgctgagggaggtgctggatgggcccgtggtggacccactcaagaacctgcggctcccgcgggagctgaagcccaacaagaagtacagctggatgcgcaagaaggaggagcggatgtatgccatgaagtcctccctggaggacatggacgccctggagctggacttccggatgcggctggccgaggtgcagcgccagtacaaggagaagcagcgtgagctggtgaagctgcagcgccgccgggactccgaggacaggcgcgaggaaccccatagaagcttggcacgcagaggccctggcaggccgcggaaacggacccacgccccgagcgccctgtcgcccccccgcaagagagggaagagcggccacagtagcggaaagctgagcagcaagtctctgctgacatcagatgattatgagctgggagcagggataagaaagagacacaaggggtctgaggaggaacatgatgccctcatcggaatggggaaagccagggggaggaaccagacttgggatgaacatgaggcctcgtcggacttcatcagtcagctaaagattaagaagaagaagatggccagcgaccaggagcagttggcaagcaagctcgacaaggccctctccctcaccaagcaggacaagttgaagtcgcccttcaagttttcggacagtgctggggggaaatcgaaaactagcgggggctgcggcaggtacttgactccttacgacagcctgctggggaagaacaggaaggcgctggccaagggcctcggcctgtctctgaaatcctccagagaaggtaaacacaaaagggcagccaaaaccaggaagatggaggtggggttcaaggccagaggccagcccaagtcggcccattccccgtttgcctcggaagtgagcagctactcttacaatacggactcagaggaagacgaagaattcctgaaggacgagtggcccgcccaaggcccctccagctccaaactgacgccttccctcctgtgtagcatggtggcaaagaacagcaaggcagctggtggccccaagctgaccaagaggggcctggcggccccccggactctgaaacccaagccggccaccagcaggaagcagccgttttgtctgctgcttcgagaggccgaggcgcgttcctccttcagcgactcttcggaggaatcgtttgaccaagatgagagctcggaggaggaggacgaggaggaggagctcgaggaggaggacgaggccagcggtggtggctacaggctgggtgcccgggagcgggccctgtcaccgggcctggaggagagtgggctgggcctgctggcacgcttcgccgccagcgccctccccagccccacggtgggtccatccctgtctgtggtacagctggaggccaagcagaaggcccggaagaaagaggagcggcagagcctgctgggcacagagttcgagtacaccgactcagagagcgaggtcaaggtgcgcaagcggtcgcctgcggggctgctgcggcccaagaaggggctgggggagccgggaccctccctggccgcacccacgcctggcgcccgcggtcccgaccccagcagcccagacaaggccaagctggcggtggagaaggggcgcaaggcccggaagctgcggggccccaaggagcctggcttcgaggcggggcccgaggccagcgacgacgacctgtggacgcggcgccgcagcgagcgcatcttcctgcacgacgcctcggctgctgcacctgcgcccgtcagcaccgcgcccgccaccaagaccagccgctgcgccaagggcggccccctgagcccgcgcaaggacgccgggcgtgcaaaggacaggaaggaccccaggaagaagaagaaagggaaagaggctgggccaggagctgggctgccgccgccccgagctcctgccttgccctctgaggccagggctcctcctcctcctcctcctcctcctcctcatcctcctcttcctcctcctcctcttcctcctcctcctcttcctcttcgtcttcctcctcttcctcctcctcctcttcctcgtcctcatcctcctcctcctcctcctcttcctcctcttcttcctccaccacagacgaggactcttcctgcagctcggacgatgaggcagcccccgcccccacggctggcccttccgcgcaggcggcgctccccaccaaggccaccaagcaggccggcaaggcgcggccctcggcccactccccaggcaagaagacgcccgcgccccagccccaggcgcctcctccgcagcccacacagcctctgcagcccaaggctcaggccggggccaagagccgacccaagaagagagagggcgtccacctccccaccaccaaggagctggccaagcggcagcgcctgccgtccgtggagaaccggcccaagatcgccgccttcctgccagcccggcagctctggaagtggttcggcaagcccacccagcggcgtggcatgaagggcaaggcccgcaagctcttctacaaggccatcgtgcgcggcaaggagatgatccgtatcggggactgtgccgtgttcctctctgccggccgccccaacctgccctacatcggccgcatccagagcatgtgggagtcgtggggcaacaacatggtggtccgcgtcaagtggttctaccaccccgaggagaccagcccgggcaagcagttccaccagggccagcactgggaccagaagtccagccgcagcctcccggcggccctgcgggtctccagccagaggaaggacttcatggagcgcgcgctataccagtcctcgcatgtggacgaaaatgacgtgcagacggtgtcgcacaagtgcctggtggtgggcctggagcagtatgagcagatgctgaagaccaagaagtaccaggacagcgagggcctgtactacctcgcgggcacctacgagcccaccacgggcatgatcttctccacggacggcgtgcccgtgctctgctgagcccgccgggccctgcgggccacctgtgccccgagggcggccagggacccatctccatcactgccatggcgcggagaccacgtgcgttgtgtgcatgcgagcgctcctgcaggcgtgtgcatggggccaggtgtgcacgtggatgcccgggtgagtgtgtgtgcatgcacgtgtgtgcacgcatgtgcacatgcctccagccccaccttccaacccctcagtgcccccaggacaggggcccctcttagctatcagggtatggccggaccggcccttcctgcccagcacgttgcaagcacttggccaggccggccctccaggctgctgctgcgtgggggcccgggtgcccccaggtccatgcagactggggattcggtggggaggggcgcttctaaggaaccaaactgacgctcactctgggcttcccaagcacccttagcatggagcccaccccaaggcctcccaccgtgcatgggacagggcagcccgatgccagctggcctacctgactgtgccaggggccctgcccccaccctctcaggatggcctagacttggggaacagagccgggtggggttgcagcccggagtgtctgtcaaaggcaccaggtggagagggcccggcacaggcccaccctggtccaaaccctcacactacagaaaaccccaatggtgctgaaactgtcgcccggccacgcctggcccctccccacccaggagggaggtggcacttcttaacctgtacagttttattgtaccaagagactcgccccgcccctgtatcataagcctttaaatggagtcaactttttaattatatatataaagataaatatatataaatatatatataaactttttaaaactgtgaaaaatagctatgaaattataaaaaaaaacattctgacgtgcagaatattattttttatttcctgttagattatagtgtctagcaccggcttcaccggcctcccagtccccagcacaccccccgcccaccccaccaagtgtactgtactcaccccccaggatagagaagtgtttgttagggagagaagagggagaggcaggagccggcccaagcccagggtccctgcttgggccccagaaagcacttaaccaggccccaagccttcaagggaaaccaaggcctcaaccagacaatcttgagggaaggaaaagccagactttgggtttgttttttgggggaattattggtttttttttttatgtttcttttggaattttgtttgttggcaaattctgtgtgatcttttttcataaaaaaaaagaaaagatttaattggaaaaat

SEQ ID NO: 82 - DNA, 5123 bp, Homo sapiens
taaagccacacagaggaagttacgcagcccggatcagaccgagagataaaagccccgatggtgatcgtgagtgatggcaagaggatttagcctcggcattaacttggaacggctgcgggcggctccctggccccgatctgacggcggcggcggcggcggccacagcggcgggagcggcgcggggaaggagcagcggctcgcagccctcggcccgcgcccccacccagcgccagcccgaggggggaggcgcagcgccggagggtggcggtcctcggccctcccaggtctccgcgccgggaagccgctccgagccgggattgtgcctatgattggggggctgtttctcagtgcctggctcttcatggttggccagcacgtggagcactctgttcatctgtacatataggtgttgttgctaatgagctctctctctctcctcccctcttacaatgaaagacaagtcagaccccaggtacctggatggattgagagctgagatctcagaaacttcataataagttgccgatggctaccagccaaggctggagggttgttttgccgttgtgttgagcacgtcacccattaagagccctttaaagacctggattgattggaaggacaaaaattaaaagcaatctgatccagcctcatgcaggatccctgcggattttctccttatcccatttccatccactgtcacaatttgagaatctgcctgatttgatcagattcacctccaggggaggtgtgataccagggttaggaggacgtgaagttatgggcaactttctgatctgtccatcagcagtctgagaaacgctggctctgaattttccgtgtcggccttttggaaacaacaagttcctcgctgtttgcaaagcttcagtgctcgggtccctgggacaccccggccaccctcgcctggtagatgtggcatttccatgctgaggccgcgagtcccgcctgaccccgtcgctgcctctccagggcttctctgggccgcgcctctgcagactgcgcagccatgctgcatctgctggcgctcttcctgcactgcctccctctggcctctggggactatgacatctgcaaatcctgggtgaccacagatgagggccccacctgggagttctacgcctgccagcccaaggtgatgcgcctgaaggactacgtcaaggtgaaggtggagccctcaggcatcacatgtggagacccccctgagaggttctgctcccatgagaatccctacctatgcagcaacgagtgtgacgcctccaacccggacctggcccacccgcccaggctcatgttcgacaaggaggaggagggcctggccacctactggcagagcatcacctggagccgctaccccagcccgctggaagccaacatcaccctttcgtggaacaagaccgtggagctgaccgacgacgtggtgatgaccttcgagtacggccggcccacggtcatggtcctggagaagtccctggacaacgggcgcacctggcagccctaccagttctacgccgaggactgcatggaggccttcggtatgtccgcccgccgggcccgcgacatgtcatcctccagcgcgcaccgcgtgctctgcaccgaggagtactcgcgctgggcaggctccaagaaggagaagcacgtgcgcttcgaggtgcgggaccgcttcgccatctttgccggccccgacctgcgcaacatggacaacctctacacgcggctggagagcgccaagggcctcaaggagttcttcaccctcaccgacctgcgcatgcggctgctgcgcccggcgctgggcggcacctatgtgcagcgggagaacctctacaagtacttctacgccatctccaacatcgaggtcatcggcaggtgcaagtgcaacctgcacgccaacctgtgctccatgcgcgagggcagcctgcagtgcgagtgcgagcacaacaccaccggccccgactgcggcaagtgcaagaagaatttccgcacccggtcctggcgggccggctcctacctgccgctgccccatggctctcccaacgcctgtgccgctgcaggttcctttggcacaactctcaggctctcccaggagctccatcagtgctgctttggaaaacgggacaggactttttgcaggtctcttggcccctgggtgggctccctgctcctcctgccacccacgccacttctctcacctggatctgggagagcagtctctcctgccagtcaagagtggggtgaccttcccccaccaggggcagaatccaccccctagcctaaccatgggggcagcctccctctgggcagcctctgcagccagcttgtcccagggctctgctcgtccaggtcagctcaggtcccaggggagtcggaccagggaggggcatctgcaggaggtgggggtcctgagagttccccaggagggcgagggcgacatggcgcccacaggttatcagtaaatgtcatcgagactgtccccagacactcacagggtgccaggcacggtctctcctttcagccttgcaaacccctccccctgggaggtcgccatctgctctgcgaggcagcaggagaggactggccaatgtcaaagagccagccgggagcagaccccaaatctcagagatgcttctggggtgcaccgtcaccctccaccagggctctgtggggccccacatcccacccaagttgtccctcccggacccagggggcccctggctgggaagccagtgagccgagagggcgccagaaagaagctggaccctgcagggacgctggtctgcacagccgtcgtaagttgcttctctgtggtgtccccaccccggcaaccccccaaccctctcttgcttttcccatctctcaccaggcatcagcaggtcccagaaagaccccgaccccaaaggccctgtggccactgcggccaccacagccatgacaggggcccctactactcctgtcccctccacgtccactgcctgggcccccatggcgcccagcaccccacagcccacaggtgggtgccagggtacagcgacccctgtcatcccaccctctcctgcttctagcctgggtccctgcctctcttggggtgggagggtcggcagccctgggcagagagcaggggcttggctcttagaatagagacgctagaaccctagagctgggaggccacaggccaaaggggcttgaggacacctgggtcaacctgttcctgagcccagccaggggattcagggatcagttcagcttccaaagtcgtcttcctcctgcccttcaagccattgcttggaagggctcccagaccattgtggccagacggctgcaggaactgagaggaaaggtgctgggggcagcgaggccatcctgacatgcagccaaagactggccttatctcccaatggtgcttctgcctccgtggtccctggagccccgcccacaccctgtccccacctggcccccagggcctctctgtccttagcccctcagcagcacaccggtgggatggatggagcagggttagcccagaaagcaaatgtctctgatcagcagggcaaagggagcctctggagctgagtttggacaccgtgggctgctgggaatgtggaggctgtgtgtgtagtgcaaggccaggccagggccagacgtcctgccccctcaggggtctgccacagacaggcatggaaacctgattctcgctcccctccaacggagggattcacgtgtattcaaggctgggggtgctggagtgggcctctgctctcacctggactcacctggggagtatccctgcactctgtgcagtgcaggtgccaggggtctgaaaggatttatccttcccagagggcaccaggaagacgatgaccaaggggaattcttcctggtcccagccagggaggggtgctccaatagcctgccacaccctgtcccccgccaccctgcagggaggacctggtggggactcctggccccttgggtagtgccctggccctccatctctctgatccaaggagacctgccccactgatccttcccccttggggggtggcatttctaaagggcagagtcccctccatcagctcctgcctcggcctgttgctgggtggacactcaggctccccagacaggggcaaatgctgagagaaagacctcctccttcctaggccatccagagcagctcccctgggggcagcacaccccacctctttctacatccttccttttctgcaggaggcatttacaggaggcaggggctagccaaaagattggaggatttccgggaagcctcctgacccaggaatcctctttggggtggaagacatgggtcactctgagaattctggacttcagacataggttggcccagccacaagggacctgtgctttgctgctgagcctgtggtgggcagacagaagcaaaaacagtggtggtgggtgctgtgcctgtctccaaacaggggtttggctgggaggccagatactctccatatcacatgtgcaagtgcacacatgcacacacacacatgcatgcacacacacaggcatgcacacgcacatgtacacacacacacacacagaggaatccatttgcagagctgcttctgacttggtgccagggcagccgtgggaggctgggcagattgtgcaaagttgggaattaaagaggaaaagtcagaggccagagtgggaaatgcaggggaggtgagggtccccaggaccccctcagtgagcagaaggcacaccctccctctcggcaagacagtgctgctctgcaccctcagccctgtatcaagaagcaggacattaggggaggaggtggctccaatgtgacagccagtggcccctacagcccacatctaggggctcctccctcctcttcagcaactgaagcccctgtccagagcccccattaatgaaaacgatcattgcagtagctgagggtgagttctcctgggctgtgctcgtatcattgtatcatcatatcattgtattctgggctcacagctccgtgagatggaggctgttattttcctagtcccacaggtgaggggatcgaggcttaggaagaagcagctggattttatgatatgtaaattacacctcaatcaagctgtttc

SEQ ID NO: 83 - DNA, 5417 bp, Homo sapiens
cagagctctgacttagccgtgccaaccatggccggtccacctcccagcaccgtggacgggcctctctcggcttctcaggagagcagctttcatgggaatactgtctgccttccttccgaaacctctttcactgactcggagccaccggctgggaaagacggacatcccagagatccctcagcggtcagcggcgtccctgggaaggacagcagagacggcagtgagagggccccaaagtcaccagatgctctggagtcggctcagtcggaggaggaagtggacgagctgtccctcattgaccacaacgaaattatgtccaggctgacgctcaagcaggagggtgatgacgggccggacgtccgcggaggatctggggacatcttactggtccatgctactgagactgacaggaaagatttggtgttgtactgcgaggcattcctgaccacctacaggaccttcatctccccagaggagctcatcaagaagctgcagtacagatatgagaaattctctccctttgccgacacattcaagaagcgcgtcagcaagaacacgttcttcgtgctggtacgggtggtggatgagctctgcctggtggagttgacagaagagatcctgaagctgctgatggaactggtcttccgcctggtgtgcaatggggagctgagcctggcccgtgtgctccggaagaacatcctggacaaggtggaccagaagaagctactcaggtgtgccacctccagccagcccctggcagcccggggggtagcagccaggccggggaccttgcacgactttcacagccatgagatagcggagcagctaacgctgctggatgctgagctcttctataaaatagagattcctgaggttttgctttgggcaaaagagcagaatgaggagaagagccccaacttgacccagttcacggagcacttcaacaacatgtcctactgggtccggtccataatcatgttacaggaaaaggcccaggacagggaacggctgctcttgaagttcatcaagatcatgaagcacttgcggaagctgaataacttcaactcctacttggccatcctctctgccctggactcggcgcccatccgcaggctggagtggcagaagcagacttcagagggcctggccgagtactgcacactgatcgacagctcgtcctccttccgagcctaccgggccgccctctcggaggtggaaccgccgtgcatcccgtacctggggctgatcctgcaggacctgaccttcgttcacctgggaaacccagactacatcgacgggaaagtgaacttctccaagcggtggcagcagttcaacatcctcgacagcatgcgctgcttccagcaggcgcactatgacatgcggaggaacgacgacattataaacttcttcaatgacttcagtgaccacctggctgaggaggccctatgggaactgtctctgaaaattaaacccaggaacataacaaggagaaaaacagaccgggaagagaagacctaggagcagacgccgggatccaggagaatgctcgaggggcgcagagggcagctcccagaccggagaggaccttggacctgttaggcgcatggcaggagtcccggcctcggagccatgaggctggccagccctcagcggggccgggcgggagctggagcctgccagccgcttcctgcctccttcctctgtgggagcagacccgtgggcctcagggcagccagcaggggtgcattatttaggaagcagtcaaggtgtggttcgggccatctgagtccctcattggctgccagcagtctgggggaatatgtccttggctgcaaagggctgtgtcctgactctgcagctgataagcaaaaggaccctggagggagagacaccagagaccgtgttgctggaagaggggctctgtggacccactggggcgccagtggctgcgtgctaggagaggctgtgcccagggccgcccccgcacctacctcgtgggagtagacgatggcgatgagaccgatgggaccacccagttgcaggaaaacaaactcagggctctcactgattctacatcaaggccggagtgcagtggcgtgatcttggctcactgcaagctccacctcccgggttcacaccattctcctgcctcagcctcccgagtagctgggaccgcgggcgcccgccaccatgcccggctaattttttgtatttttggtggagacggggtttcgccatgttggccaggatggtctcgatctcctgacctcgtgatccacccgcctcggcctcccaaagtgctgggattacaggtgtgagccaccgcgtccgcccggggttgtctgttttgtatatgaaaagcatgctctgccccgagccttagctatctctctctcttttttatttttgagacggagtcttgctctgtggcccaggctggagtgcagtggcaccatctcggctcactgcaacctccacctcccgggttcaagcggttctcctgcctcagcctcccgagtagctgggattgcaggcgcccgccaccacgcccagctgatttgttgcatttttagtagaggcggggtttcgccgtgttcgccaggatggtctcgatttcctgacctcgtgatctacccgcctcggcctccaaaagtgttgggattacaggcgtgagccaccgcgcccggctggaaatccataatttcaatggatcagaatttgcctgtcacgttctctgtgccaggcacggagcgggggggcggcagggatggaacccggcacatgggcctctgcctccttggcgcgctgtaggcgcgagcctaaagtcatcaggcgacagcccccgccacgttccggggcgccccgacggctccagcagcgggtggggtgggaggcgtccggacagtccggaggcctcgatggccaagaggagcctgggctggagggggccaggccccggggcggccgggggagggcccgggactggcgcagaggcagcgcgaggcagaggcaagcactcggacgaaggcgcagccccagcctcggggtgcggaacgggcaccttccgggccacttgagtctgagaccttgtagccggctcgaggcccgggcgcagcagtccctgccagccagctttcggcgcaatgggacgcgggcgctcctggtgtgccggcctcgggccctgcaccctcacgcatgcgcgcccccccccggtggactacaactcccggcgtgccccgcgcgcctcccggaagtgatcgctccagtcgcctccgacctcggcgctgggcgggcgcgccgggcctggggaaggggcgggcgcggggacccgatgcgcgggagcggaggccgagatggcttcggcgggaggcgaagactgcgagagccccgcgccggaggccgaccgtccgcaccagcggcccttcctgataggggtgagcggcggcactgccagcgggaagtcgaccgtgtgtgagaagatcatggagttgctgggacagaacgaggtggaacagcggcagcggaaggtggtcatcctgagccaggacaggttctacaaggtcctgacggcagagcagaaggccaaggccttgaaaggacagtacaattttgaccatccagatgcctttgataatgatttgatgcacaggactctgaagaacatcgtggagggcaaaacggtggaggtgccgacctatgattttgtgacacactcaaggttaccagagaccacggtggtctaccctgcggacgtggttctgtttgagggcatcttggtgttctacagccaggagatccgggacatgttccacctgcgcctcttcgtggacaccgactccgacgtcaggctgtctcgaagagttctccgggacgtgcgccgagggagggacctggagcagattctgacgcagtacaccaccttcgtgaagccggccttcgaggagttctgcctgccgacaaagaagtatgccgatgtgatcatcccacgaggagtggacaatatggttgccatcaacctgatcgtgcagcacatccaggacattctgaatggtgacatctgcaaatggcaccgaggagggtccaatgggcggagctacaagcggaccttttctgagccaggggaccaccctgggatgctgacctctggcaaacggtcacatttggagtccagcagcagaccccactgaggggctgccgagcctcagggcaggtctcccgcccggcatgtgtgttcagggactgagcctggggacgcccacccacacccactgcttcctctcggcgcaccccaggggagtgttagcagcgaggccttcctcactcaggagtggaaactcagatgtgtcactcagactcaacttgctgggacactgacaggcgttcctgaggttttcagccacttaggctcgttgcggtttaaagatccctctaggtcactgagaaatgccacagaatgtgcaggaagcctgggaggcttctgtgaggaatgtgaggcacattattggggaaattgaggagacagcctagacactggctggcctgatgttttgttgacagtgaacccacagtgggagagagttttttccagtctgatctggttcttacacacacacataactcaaaagttttgtgaacaagtactttccttttttacatgttacatgtcctcatgttttctgttttctgtttcataacacaaggctggttgtggcctacaaacctaatttcatgacccagtggtttgcagtccagcgtggcctacacggatatggggagccactgagggatgttttccccccttgcttgtgccttaaaggcagagaagcgaggcggatgccctggaagcacccagcatcacacccaggcttgtgcggggccaggctgggagcccatgcagtagggcagaaggcagcggaggccaggtctgtcccggctggagaacagcgtccacgcagtcctgcctggggtcaggccctcactgaccctcaggggagcccccaaggtgctgtctgtctagacaggctgtcccaccccagggtggctagtggccatatgcagggaatggtgcttctggctgtggcacgcactggatcacccaggtcccagcagacatggccgcccaaagtcagcaagcctcctttgtgctatgtggagctcacagcctcacatgtgaacacccgtgtctgggttgcctggggtgatcctccctcctgcgtggtggctgtctctggaaagcatcccttgccgctgccacgggcagccccagcccccgtccgtccaggctcacccacagtagtgatgcagacgtgacgtgggggaagggggctgagccctgtggctgggttctgacaactgtaacggttttgtcgagcttaggcccctttggagggagaatcaataaataacaaacaccaact

SEQ ID NO: 84 - DNA, 5429 bp, Homo sapiens
tcgcgatctagaactagtgccctgtctctactgaaaatacagaaggattggctggacatggtggtgggtgcctgtggtcccggctgctcgggaggctgaggcaggagaatgacatgggccttggaggcggagcttgcagtgagcccagatggcgccactgtgctccagcctgggcgactgagcgaggctccgtctcaaaaaaaaaaaattctttcatttatttagttacttttagagatagagcctcccgctgttgcccaggctggagtgcagtggcagtcatggcttactgcagctttgaactcctgggctcaaatgatcctcctgtctcagcctctccagtagctgggactgactgcaggcacgtgccaccacacccagctaatttttatttttatttttatttttttgagacagggttttactctgtcacccaggctagagtgcagtggtgagatcatggctcactgtagcctctgtctccggggctcaatcaatcctcccacctcagcctccccagtggctgggattactggtgcacaccaccataccctgctaattgtatttatttttagtagagatgggattttgccatgttgcccagactggtcttgagctgctgggctcaagcgatcttcccatcacagcttcccaatgtgctgggattacaggtgtgagccactgtacctggccagctttacttcttttaccagcactcctgattttataaatagtgaggcttatcaaccccatttctacccaaatcttctggtagacttgagtatagtagggcttcataggtagcagccctgtccctgtcctattatgatggtagctgttgtgatgtggcgatctctgatctagaaacccctgaggggccattgtggcctgcccagtctcccggccacggttgaaaccagacgtgcagtggggctgacccctgtgccccaccccagagtcatgccagcgtgggtggtggggcattctctgggatgaatgatctggatcccatagccatctgtgtcctgtttgaggaatgggaccctcaaacagagaacagccaagatgctcaagcaggtgtgtgcttgggccagactctgcagcctttggtttgggacttgactgccattcactgaaggggcccaggaaatgggcagctcacatggtgttgctgggtgtccagctgcggcagtttagcagaggaggacttgtaatgagatggtagcttcttataggctaagacatgatttttctgttcttttactacctcctgcaccttctagaactgttccttcctgatgctgttttcctttcttccagtggtttatctctagggtctccatagcaggggaggtagggtcagactcctgagatggctgatgtcctaccctgcccccaaccaggggccccaggagactcctttttcttactgcaactttggcctcctcagtctgcagatctccaggggagcccaccagcctagtcaacatggcctcggaagacattgccaagctggcagagacacttgccaagactcaggtggccgggggacagctgagtttcaaaggcaagagcctcaaactcaacactgcagaagatgctaaagatgtgattaaagagattgaagactttgacagcttggaggctctgcgtctggaaggcaacacagtgggcgtggaagcagccagggtcatcgccaaggccttagagaagaagtcggagttgaagcgctgccactggagtgacatgttcacgggaaggctgcggaccgagatcccaccagccctgatctcactaggggaaggactcatcacagctggggctcagctggtggagctggacttaagcgacaacgcattcgggcccgacggtgtgcaaggcttcgaggccctgctcaagagctcagcctgcttcaccctgcaggaactcaagctcaacaactgtggcatgggcattggcggcggcaagatcctggctgcagctctgaccgaatgtcaccggaaatccagtgcccaaggcaagcctctggccctgaaggtctttgtggctggcagaaaccgtctggagaatgatggcgccactgccttggcagaagcttttagggtcatcgggaccctggaggaggtccacatgccacagaatgggatcaaccaccctggcatcactgccctggcccaggctttcgctgtcaaccccctgctgcgggtcatcaacctgaatgacaacaccttcactgagaagggcgccgtggccatggccgagaccttgaagaccttgcggcaggtggaggtgattaattttggggactgcctggtgcgctccaagggtgcagttgccattgcagatgccatccgcggtggcctgcccaagctaaaggagctgaacttgtcattctgtgaaatcaagagggatgctgccctggctgttgctgaggccatggcagacaaagctgagctggagaagctggacctgaatggcaacaccctgggagaagaaggctgtgaacagcttcaggaggtgctggagggcttcaacatggccaaggtgctggcgtccctcagtgatgacgaggacgaggaggaggaggaggaaggagaagaggaagaagaggaagcagaagaagaggaggaggaagatgaggaagaggaggaagaagaggaggaggaggaggaagaagagcctcagcagcgagggcagggagagaagtcagccacgccctcacggaagattctggaccctaacactggggagccagctcccgtgctgtcctccccacctcctgcagacgtctccaccttcctggcttttccctctccagagaagctgctgcgcctagggcccaagagctccgtgctgatagcccagcagactgacacgtctgaccccgagaaggtggtctctgccttcctaaaggtgtcatctgtgttcaaggacgaagctactgtgaggatggcagtgcaggatgcagtaggtaatgtgggctgggtgagacctgggtgccctctgtcccttgatgctcgtgggccccaggtatccttcgtggttgccgtaactcgtcagccccagcgctctcatgggaactgctctttggccacctgagtttttcctccgtcagggtcctgccgtggagccagctggctgctcttctccctgtttttcaccactgagaaactgaggcctttcccaaatccacacagccatgtacagttagaacccatagcccgctctaggaagtccagatagccacatctgcaagcccaatggacgcaggtctatcgggaggagggatggtgagagccaagcccttgtccacaccttggagcttctgtgctcacgtccactctacctggaggttccttgcacagaggacacctttccccataacattatgggggcttccttggagcaccagcccatatccctccagccctatcacaaccctctccccaccctgtctgtttcctccattccagcacctgtcaccttccaccctgtttccatgtgcttgactgagcctccacatctaacgaaacctgagccagttccggttaggcagaggggaggaagggccctgaggcgagggggacggttcctggaaaagatagaaaggggtggaaggacatgtggtgcctcttcccggcgtggcgtcgaagcggggagggcggctcagtgggaaatgaggctcggaaggaggtgggggccagacacaagcctgctccctgagggcccgcctgtgggcatttttgggaacaagttgccctagttctgtttcccaggaagcctagcacagtccctgcacatcccctcaccctgccaaaataacctgaatcctccccagtggtagcctgcctcaggaaatctccattcccacggtgtgaggtgggcacagtgggtgtcatccccatgcccattttatacctgaggccaggatgggcaagggccagagtgtcacagctggcagatggactgagcccatcccctgatgccaactgccactccctctggttcctgtgtctctgccgtccctctcgtgttcgcctcttcgtcagggcgaggaggcaggcgagcctgtgtctgcgcggtgttgggggaaccctgggtgccttggcccagccctctgccatagccagcagcctgcccctgctgcttctgccctacagatgccctgatgcagaaggctttcaactcctcgtccttcaactccaacaccttcctcaccaggctcctcgtgcacatgggtctgctcaagagtgaagacaaggtcaaggccattgccaacctgtacggccccctgatggcgctgaaccacatggtgcagcaggactatttccccaaggcccttgcacccctgctgctggcgttcgtgaccaagcccaacagcgccctggaatcctgctccttcgcccgccacagtctgctgcagacgctgtacaaggtctagactcaaagcctctcccatcccttggcctggaccagtgagctggggagggactcggatgaactgaggcgcagcctacgccattgccttggacaggactctggccacaggcagggcgggtctgtgtcccatgtgtcctgtcagtcccctgagtatgtgtgtgggtgtggcgcatgtgcaggtctgtgcctcctgtcgggatttgggttttaacgtcttctgctggcccagccctgctctgttgtggggagttggcccccaggggaaagggctgtgagctgctccgccattaaactcacctccacctgagggcgctctgctgatctccgcctgggccctgatggccgtccccacccacctgccttccggcccggctccctggcggagccagaacccagggagttgcccgcgtgctgtccttcccctctgtgttgtgattgggttgtttcctgccctgcctggggctgcttctcgtcaccaagccctggtcctgcggcagctgtcacccctaccatccataccactgtgctgaccgctcagcctgaagagcagagaatgccatgggtgggactgtgggggtcggatcgtggggttgttggcagagggcaaccctgggccccacaccatgtggacaggcagacactagattgtccaggagcaggagctgctgggactgcgctggccccggacctagtgggccttctcctggctgctgagatgtcgtctgtgactggcctggctggagggggagtgttgacaacccaaagctgttctccagtctggggagggagaggcagggtccccaatgtccgagctgcatctggacgctgctcttaaaggacctcctggggcaggggagcggtagggtctggactgggcagatgctgtatgacctccctgagcacccgtgactgccccatgctttcccctttgtgctctgtgtgtgtctgggctgtgcccgggggcttcacaaataaagtcgtgtggcagc

SEQ ID NO: 85 - DNA, 4993 bp, Homo sapiens
ggccgggcttggctggctctcattcgaagaggcagcagagacctacctggggactgctttgggcctgattaaggggaatccttagaatttggctaggccacagagggggatatctggcatccactgagcttgaagggcaggaacaggggacaggagagatcaggacgatcgtcttgggagggcgcatctggggaagctcagaaattggactagggcaggaggcctctgggatctggcagaagttaagggcagagtgtcgggggaaggggactcttcagggactgtgcctgcatagaagagaccacgggggccggggcgctatcacggtctggggcggggcccctggatgtggaggcggctgggccctcgcccagccgctgcgagggaggtggaagccttcgggctcggagccggggtcagcggcatgggccaccctgggacgagggctcttcgctgggtcccatgaggatccgccgggccccgccgccgccgcctgtggcccgtttccacatcccccctcccgcgctcccgagcccgcgactgcgcggccgaggatggcgcagctggcggggaccccgcacttgggcgggcgtggatcggaggcctccgcctgtccgccgagggcgttcccgtcgtcatgcggccaccgcggcctcaggggctccacctgggtctcacacggagccccagagacccagcgctgaccccggcccctacctccgcagcttgccttgcgccatggactggcagccagacgagcagggcctgcagcaggtcctgcagctgctcaaagactcacagtcgcccaacacagccactcagcgcatcgtgcaggataaactcaaacaactcaatcagtttcctgacttcaacaactacctgattttcgtcctgaccagactcaagtcagaagatgagccaacgcgctctctcagtggcctcatcctcaagaacaacgtgaaggcacactatcagagcttcccaccccctgtggcagacttcatcaaacaggagtgtctcaacaacattggcgatgcctcctcgctcatccgagccaccattggcattctcatcaccaccatcgcttccaagggtgagctgcagatgtggcccgagctgctgccccagctctgcaacctgcttaactcggaggattacaacacttgtgagggagcctttggagccctgcagaagatctgtgaagactcatcagagcttctggacagtgacgccctcaacaggcccctcaacatcatgatccccaagttcctgcagttcttcaagcactgcagtcccaagatccggtcccacgccatcgcctgcgtgaaccagttcatcatggaccgggcccaggcgctgatggacaatattgacaccttcatcgagcacctatttgccctggctgtggatgatgaccccgaggtgcggaagaatgtgtgccgtgccctggtgatgcttctggaagtgcggattgacaggctcatcccccacatgcacagcatcatccagtacatgctgcagaggacccaggaccatgatgagaacgttgcccttgaggcctgtgagttctggctgacgctggccgagcagcccatctgcaaggaagtcctggcctcccatctggtccagttgatccccatcttggtgaatgggatgaagtactcggaaattgacatcatcctgctcaagggggatgtggaggaggatgaggctgtccccgacagtgagcaggacatcaagccacgcttccacaagtcacgcacggtcacactgccccacgaggctgagcggcctgatggctccgaggacgcggaggatgacgatgatgatgatgctctgtccgactggaatttgaggaagtgctcagcggctgcactggacgtcctcgccaatgtcttccgggaggaactgctgccccacctactcccactactcaaaggcctcctcttccaccccgagtgggtggtcaaggagtcgggcatcctggtgctgggcgccattgctgagggctgcatgcagggcatggtgccctacctgcctgagctgatcccgcacctgatccagtgcctgtcggataagaaggccttggtccgctccatcgcctgctggacgctgagccgctatgcccactgggtggtcagccagccacccgacatgcacctcaagcccctgatgacagagctgctcaaacgcatcctggatggcaacaagagggtacaggaggcggcctgcagtgcttttgccaccctggaggaagaggcctgcacggagctggtgccctacctcagctacatcctggacacccttgtctttgcctttgggaaataccagcacaagaacctgctcatcctctatgacgccattggcaccctggccgactctgtaggccaccacctcaaccagccggaatacatccagaagctgatgcccccactgatccagaagtggaatgagctcaaggacgaagacaaggacctcttccccctgctggagtgtctgtcatcggtggccaccgccctgcagagtggcttcctgccttactgtgagcccgtctaccagcgctgtgtcaccctggtgcagaagacactggctcaggccatgatgtacacccagcaccctgagcagtatgaggctcccgacaaggacttcatgatcgtagcactggatctgctcagcggcctggccgagggcctgggtggtcacgtggagcagctggtggcccgcagcaacatcatgacattgctgttccagtgcatgcaggactcgatgcctgaggtccggcagagctcctttgccctcctgggagacctcaccaaagcctgcttcatccatgtcaagccctgtatcgccgagttcatgcccattctgggcaccaacctgaacccagagttcatctccgtctgcaacaacgccacctgggccattggtgaaatctgcatgcagatgggggcagagatgcagccttatgtgcagatggtcctcaacaacctggtggaaatcattaaccgacccaacacacccaagacactgctggaaaacacagccatcaccatcggccgcttgggctacgtgtgcccccaggaggtggcacccatgctgcagcagttcatccggccttggtgcacgtccctcaggaacatcagggacaacgaggagaaggactcagccttccgcggcatctgcatgatgatcggtgtcaacccggggggcgttgtgcaggactttattttcttctgcgatgctgtagcctcctgggtgagcccgaaggatgaccttcgggacatgttttataagattcttcacggcttcaaagaccaagttggggaagataactggcagcagttctctgagcaattcccgccgctgctcaaggagaggctggcggctttctatggggtctaggtgatcatggagactgccaggtttctgtctgcgtcgtcgtcggagggattactggggagtgcgctgcatccggaagtcgctgtgccctggttgaggggggttagggaggagtgagtgggactcaaatccagatgccttccccgtccgtccgtccgtccgtccatccgtccacttgccctcctggcaggtgggtggggccaccatgctcatcctacaaacggggaggtgggggggacttctggtgggcaagggcccctgggctctaatagggtcatctctggcagcccacttgggccagctacgtgggagggaggaattacacagctgaccgaatccggcttcggatgaggtgagggaggagcaggtcaggaggggggccctcgtagggacgcgtacactcacacggacacacatggccacacgcatgtgcgggtgccataaccggcgaggctgggccagccgctccaccatttccccgactgcatggagacagtagaattagtgaacccctgagttaacccgtaaggccttccgtgtaacctgcatctagagtttaagaagcttctgctgttttgccggaattggcggtgactggggagggctgggtgggtggggggcctcaggcgggatctcggggcggggggaggaggatggtgaccttgggagtcgccctgtcagcacgcacatgcttgggacccactccacacactccctgccagctttgttgcagcctcagctggtggtgtctccgtccttatcctagcctagctcgcagggtgagaaccactggagtggctggggctggccagaggtcaccgtttctccttcctgtgtgctccagtggcttttgaagacactgggttgggacctttttcctgaagagagctgggtgtagccagagctactggcacctaccccgagcatctctctctgtaagcagcttcaggggcagtccgtttctctgtgcttctgaaacccccttctcacgtttcaggccccagttttaactcaaggcctggggcaggggcgtttaattgatgatgacagaggacacaggtttttgccagcaaaaaggaaaaccaaggcttggtggaagggaaaggtggtgtgtcccctgttccctattccatctccctgggacttcctgctcatcatagtacccagtgagcccagagatcctactagactgggtcagcaattctagagaaccttccggaatagtctgggaacatggtcaaggtggaaggggctcccctagagagggtgggggtgtagttacttcccagttggccagaaaactgggccttgcagacccccttagcattttttccctttttttccttccctgctttctacttctttggggagccccttgtgttttggagtctgactggagtctcgcatcctggggcctgctccatccatccctcctgggcgccagaccctccatccaagccctgtgtctttccatagtcagggtcaggccctgcatctattccaaggggcactcagtacacattccataaattagctgggtgtccctgcacgcccaccccatgaaactcgagcaggtctctggaagccatttgtt

SEQ ID NO: 86 - DNA, 5265 bp, Homo sapiens
gagcagcaggacttgcatttgttctcgcctgcctagtgtcttccaagggatagatgccgtttcctctgctggtctctgggggtgacggggggcgcaggggagcttcttgggggaatcactccaactctgtggagctggtggtgctgcctggtggggctctctctttgcccgggacgtggaacaactttcagctggaggacgagagggaatagtgaagctaaaggttgcttttctctgcaccgtccgttcttgctccctctgctccatcactgggaccttgtcaggcgttcataaagcaaaatttgccgaacgagggttcgcagaaaggtggggcagagctcatctgacgtggcatcagcccgtgattggtggtctactattctgggagataaagaagaatttgatcaaggctgtttgtgtctggctaatgttgacaatagtggaaatggacaagataaaataattgtgggtagctttatgggatacctaaggatctttagcccccatcctgcaaaaacaggagatggagctcaagccgaagatttgcttctagaagtggatctacgagatccagtacttcaagtggaagtaggaaagtttgtttcaggtaccgaaatgctacatttggctgtgttacattctagaaaactttgtgtctactctgtctcaggaaccttgggtaatgtggaacatgggaaccaatgtcagatgaaattgatgtatgaacataatcttcagagaacagcctgcaatatgacctatggatcatttggtggtgtaaaaggtcgagatttaatttgcatccagtctatggatgggatgctgatggtatttgagcaggagagctatgcttttggaagatttctccctggctttcttctgcctggtcctcttgcctacagttcccgtacagattccttccttactgtctcttcctgccaacaagtggaaagttataagtaccaggtacttgcttttgcaacagatgcagataaaaggcaggagactgaacagcaaaaacttggttctggaaaaagactagttgtggattggactctaaatattggagagcaagcccttgacatatgtattgtctctttcaatcagtcggcatcctctgtttttgttcttggtgagagaaactttttttgccttaaggataatggacaaattcgattcatgaagaagcttgattggagcccaagttgttttctgccatattgctcagtttctgaaggaacaataaatactttgattggaaatcataataacatgctgcatatttatcaagatgtgacactgaagtgggccacccaacttccccacattcctgtagcagtaagagtgggctgtttgcatgatttaaagggagtgatagtcactctgagtgatgatggtcacttgcagtgttcatacctggggacagatccttctctgttccaagctccaaacgttcaatctcgagaactaaactatgatgaacttgatgtagaaatgaaagaacttcagaaaatcatcaaagatgttaacaaatcacaaggtgtttggcccatgactgagagagaagatgacttgaacgtttctgtcgtggtttctcctaactttgattcagtttctcaagcgaccgatgttgaggtgggaactgaccttgtcccttctgtcacggtgaaggtcacactgcagaacagagtgatattgcaaaaagccaaattatcagtctacgtgcaaccaccattagaattgacttgtgatcagttcacctttgaatttatgacaccagatttgactagaacagtaagcttttctgtttatctgaaaagaagttatacaccatcagaattggaaggaaatgctgttgtttcttattccagaccaacagatcgaaatcctgatggcattccgcgagttatccaatgtaaatttagacttcccctaaagttaatttgcctaccaggtcagccttcaaaaactgcaagccacaaaattactattgataccaacaaatctccagtcagtcttcttagtctcttcccaggttttgccagtcagtcagatgatgatcaggtgaatgtaatgggttttcacttcttaggaggtgctcgaattactgttcttgcttccaaaacttctcaacgatatcgcattcagagtgaacaatttgaagatctttggctcataaccaatgagcttattcttcgccttcaagaatattttgaaaaacagggagtcaaagattttgcatgttctttttcgggatctataccccttcaagaatattttgagttgattgatcatcattttgagctacggataaatggtgaaaaattagaagaactcttatctgagagagctgtacaatttcgggccattcaacgccggctactagcaagattcaaagataaaactcctgcccctcttcaacacctggacaccttgttagatggaacctacaagcaggtaattgctctagcagatgcagtggaggaaaaccaaggcaatctgttccagtcattcaccaggctgaagagtgccacccatttggtgattctgctgatcgcgctgtggcagaagcttagtgctgaccaggttgctattctggaagcggcatttctgccgctacaagaagacactcaagaattgggctgggaagaaacggtggatgccgccatttcccacctgttgaagacttgcctgtcgaagagttctaaggagcaggctttgaacctcaacagccagctgaacatacccaaagacacaagccaactgaagaaacatatcaccttgctctgcgatagattatccaaaggtggccgtctctgcctaagtaccgatgcagcagccccacagaccatggtcatgccagaccccaggactggacagaggatcgaggcctggaccctaagaataccccactccctgagccagcatctccagctgatggagggacccaaaagctaagcggggtcaatcagacaccttccctgggatggttaaaactgggacaggccaatggagaaggtccttctgtctttggtctgtgatgcgaggaacacagggatctttcctgttgtgtggagaaagaggagcccagagccgtactgagccaagggggtgccagggagaggctgccaggcctgggccctggaaccagccccccaaggccctggaaccagcctgctccatgcagctgcggctcttccagtctgtgagctactcagtgccctttcaacaaaccccgccttgttttgctttaatcagtttgcattttctgttgcttctttctggaaaaatcctctgtgctttgactgactccagggtcttcctccttgaggtggatttcttagtcactgttaggtatccaaatataggcgagtgtaaggcatttttctttcaactgttcattttaatgaattacattcaggaaataagtaggaaattaaattcattgaaagactattggtctgtatgtactttttcagcctaacatgctcaaagcgtaggtagcaggcagctataatacagacattttattttttaaagggcaaagacaatggtaatttaattttagatcattccagatggagttcaagtcaacgtgctgatgactggagacctgacagaaattaaatgttggttattgcgtcccaatttcagattatgacccaatcaagggtcacttgaggatatccaaaaggttgggaagattacaataattttaaaaacacaagaaagtggtttctacctctgagctatacatatttattgggttggaggaaagggataattttctaaagggaaggggcactgtggaagaagaggcagctctggaagccagccaagggcaacagcaaggaggcagccccagccgagggcgggtttctgagcagagtggacaccagacaggagtttgcagatggtccattgggtagagcgtagggtagaaaagtaggtttcatcttatatgacaatttttgacagataatgaagactatggggagaattgtgtccagaaatagtctgaggctgaatgtgggcttaatggggcagccatgattatttatcagtggcaggtagtctgagcagagctgattctggtgctcccacgtggatcaagtatatcccatctccaattcagtctccacagcagagggagtaaataattccacctcaccacaacggagccatatgtgatgagtgcccactagttacatgaaattgggcagggaggaatttatgttagcctacatacaagtctgaacataactcacgtcagcattgccatgggaagtcaatatattgctgggtgttggcaaatattgagtttagatgactcttcctgtaaaggatagaaacattgtttttaaaacttcaatttaggctgatgagaaaatactatagaaggaaggagaacatcttgaagatttaaaaaatgatctataagctctggaaggaaatttttagaaaaatgattgaggcaccagcaattagcctaagcaaaaaacaaaacaaaacaaaaacacagtctctgaaaaaaaacacactcaaaggagagttcaaactgacataaagagacaatggaataagatgacatttacttattttattttcctttaggtttatttggtctttttctatcttcttttagctgaattagttcttttgtattcaatttttttaattttctaatacatatagttaagatgataaaattttctctgagtaccaatttgactgcattccataatggttttcaaataattttttattttgaatttttgtgggtacatagtaggtgtatgtatttatggtatacatgagatgttttgacacaagcttgcaaaccttccataacttttgctatgctgcattgaaagtattgtgatatttcaggtttgatttcctcctgtgtgcaagttatttaaaaagaagtattaaatacattctaaatgaaggggattttttcccctatgttttgaatattactttctagttctattacattatgatcaggaaatgagccctctgtgatttttactttcataatttatggaggttttttccttgaggaccattacatcaccattttttggtaaatattctgaaatcttacatttgcccaacctgatctgttgatttgtgagagattaggtcaaagttttccacaatgacattggatttgttaatatctccttatccttccaaaatttttactttatatgctactatttaggtgaataaagattcacaaaaatgtttccaccttct

SEQ ID NO: 87 - DNA, 4917 bp, Homo sapiens
agaagatgtcttcgcggacggtgctggccccgggcaacgatcggaactcggacacgcatggcaccttgggcagtggccgctcctcggacaaaggcccgtcctggtccagccgctcactgggtgcccgttgccggaactccatcgcctcctgtcccgaggagcagccccacgtgggcaactaccgcctgctgaggaccattgggaagggcaactttgccaaagtcaagctggctcggcacatcctcactggtcgggaggttgccatcaagattatcgacaaaacccagctgaatcccagcagcctgcagaagctgttccgagaagtccgcatcatgaagggcctaaaccaccccaacatcgtgaagctctttgaggtgattgagactgagaagacgctgtacctggtgatggagtacgcaagtgctggagaagtgtttgactacctcgtgtcgcatggccgcatgaaggagaaggaagctcgagccaagttccgacagattgtttcggctgtgcactattgtcaccagaaaaatattgtacacagggacctgaaggctgagaacctcttgctggatgccgaggccaacatcaagattgctgactttggcttcagcaacgagttcacgctgggatcgaagctggacacgttctgcgggagccccccatatgccgccccggagctgtttcagggcaagaagtacgacgggccggaggtggacatctggagcctgggagtcatcctgtacaccctcgtcagcggctccctgcccttcgacgggcacaacctcaaggagctgcgggagcgagtactcagagggaagtaccgggtccctttctacatgtcaacagactgtgagagcatcctgcggagatttttggtgctgaacccagctaaacgctgtactctcgagcaaatcatgaaagacaaatggatcaacatcggctatgagggtgaggagttgaagccatacacagagcccgaggaggacttcggggacaccaagagaattgaggtgatggtgggtatgggctacacacgggaagaaatcaaagagtccttgaccagccagaagtacaacgaagtgaccgccacctacctcctgctgggcaggaagactgaggagggtggggaccggggcgccccagggctggccctggcacgggtgcgggcgcccagcgacaccaccaacggaacaagttccagcaaaggcaccagccacagcaaagggcagcggagttcctcttccacctaccaccgccagcgcaggcatagcgatttctgtggcccatcccctgcacccctgcaccccaaacgcagcccgacgagcacgggggaggcggagctgaaggaggagcggctgccaggccggaaggcgagctgcagcaccgcggggagtgggagtcgagggctgcccccctccagccccatggtcagcagcgcccacaaccccaacaaggcagagatcccagagcggcggaaggacagcacgagcacccccaacaacctccctcctagcatgatgacccgcagaaacacctacgtttgcacagaacgcccgggggctgagcgcccgtcactgttgccaaatgggaaagaaaacagctcaggcaccccacgggtgccccctgcctccccctccagtcacagcctggcacccccatcaggggagcggagccgcctggcacgcggttccaccatccgcagcaccttccatggtggccaggtccgggaccggcgggcagggggtgggggtggtgggggtgtgcagaatgggccccctgcctctcccacactggcccatgaggctgcacccctgcccgccgggcggccccgccccaccaccaacctcttcaccaagctgacctccaaactgacccgaagggttaccctcgatccctctaaacggcagaactctaaccgctgtgtttcgggcgcctctctgccccagggatccaagatcaggtcgcagacgaacctgagagaatcgggggacctgaggtcacaagttgccatctaccttgggatcaaacggaaaccgccccccggctgctccgattcccctggagtgtgaagctgaccagctcgcgccctcctgaggccctgatggcagctctgcgccaggccacagcagccgcccgctgccgctgccgccagccacagccgttcctgctggcctgcctgcacgggggtgcgggcgggcccgagcccctgtcccacttcgaagtggaggtctgccagctgccccggccaggcttgcggggagttctcttccgccgtgtggcgggcaccgccctggccttccgcaccctcgtcacccgcatctccaacgacctcgagctctgagccaccacggtcccagggcccttactcttcctctcccttgtcgccttcacttctacaggaggggaaggggccagggaggggattctccctttatcatcacctcagtttccctgaattatatttgggggcaaagattgtcccctctgctgttctctggggccgctcagcacagaagaaggatgagggggctcagcggggggagctggcaccttcctggagcctccagccagtcctgtcctccctcgccctaccaagagggcacctgaggagactttggggacagggcaggggcagggagggaaactgaggaaatcttccattcctcccaacagctcaaaattaggccttgggcaggggcagggagagctgctgagcctaaagactggagaatctgggggactgggagtgggggtcagagaggcagattccttcccctcccgtcccctcacgctcaaacccccacttcctgccccaggctggcgcggggcactttgtacaaatccttgtaaataccccacaccctcccctctgcaaaggtctcttgaggagctgccgctgtcacctacggtttttaagttattacaccccgaccctcctcctgtcagccccctcacctgcagcctgttgcccaataaatttaagagagtccccccctccccaatgctgaccctaggattttccttccctgccctcacctgcaaatgagttaaagaagaggcgtgggaatccaggcagtggtttttcctttcggagcctcggttttctcatctgcagaatgggagcggtgggggtgggaaggtaaggatggtcgtggaagaaggcaggatggaactcggcctcatccccgaggccccagttcctatatcgggccccccattcatccactcacactcccagccaccatgttacactggactctaagccacttcttactccagtagtaaatttattcaataaacaatcattgacccatgcctactccatgccaggcccagtgctggacacagagacatgaagctctgtctgtgggagacagggattctgacacagacaccggacaaaccattgtcttggggagcccagaagagaaagtgggcagggtggggtcattggggaagatgctctagaggaattaatgctggaatggggtgttgaaggatgagtaggagttagttaggcattgagtttgccctgggcaaaagcccagaagtgggagtatgtggtatatcttcagagaactgggtaatttcagtgtggctgctgtgttgggcatggatggagaatcagcaagagaaatgctgtattaggactaataatccatctacgctgcttaagcaaaaaggtatttgttggtttatgttacttaatagtccaggggcacctggcttcaggtaggtttgatccaggcatcaggccattgcatctattttttcagtgtaagttgaattctagtaatttttatcaagtaagggctcctttcctggtggcacagatgacttcagcagttagaagtttctatccctccagctttctgcagcagaaagaccctcattgtcagtttcccagcaaaagtcccagggcagactctcattggcccaaatgggccatgtgattttctctaaaccaatcactgtgactctagagtggccagactcagagctgcacttagtaggggttcctcaaaggaaggtcaagtgtcatgagcaggagaaaaggcatgggagctggacagattatagtggttgaagtctgtgcagtacagaagggcggagcttattcacacagcacctttggggccaaaatgaataagctggactttctccccatggcactggggaaccatggaagttcagggaacttcagggaagaggcttggtcaattcctgagagcatcctctgtgctggggacacagtggtaatcaagacagccccaacactgccctcatagagctcacagtccaatggaggaggcagatgtgtcctcaggcagcgactgggcagggctggtataggggagtccagaggtgatgcctgcctcagccagggagggcttcctggaggagaaggagccagctagacatggataggagtgcgttttaggcacagcaaatggcacatacaagggccagggagcaagagagaggacaggtcctcaacaaatggcatgtgactttgtaagtgtagaattgctgtgaggtatggggctaggggcgtcagtagggccttgaaggttatggacaggggcctgggctttcttccaagggcactgggggagccatggcaaggttgtaggtagggtagagatgggcgggtttgtgctatgtgcagggtggaagggagggaagttgacaggtcagaagatcaggaaagaggtcggggctggacagatggggagagcgcagatagatttaagagagtcctgtgaggcaaagtgggcaggacctggtaacaggtgtctggactgtggctttggctggctcagaaggtccccactggcgtgtgtggtctatgtagcctctgggtgtggagctgggatcttcaactggggacagtacagtaaagaacatcacagc

SEQ ID NO: 88 - DNA, 5710 bp, Homo sapiens
ggcgacggacggcgcgagctgcgagcccgacttgtcccgggccccggaggacgcggcgggggccgcggcggaggcggcgaaaaaagagtttgatgtggatactctcagtaaatccgagctgcggatgctcctcagcgtgatggaaggggagctggaggccagagaccttgtcatcgaggccctgcgggctcgcaggaaggaggtatttatccaggaacggtatgggagatttaatctaaatgacccgttcctggcactccagagagactatgaagcaggtgctggtgacaaagagaagaagccagtttgtaccaaccccctctccatccttgaagcagtcatggcccactgcaagaaaatgcaagaaaggatgtccgcacagctggctgctgctgagagcagacaaaagaagctggaaatggagaagcttcagctacaagcccttgagcaagagcacaagaagctggctgcccgccttgaggaagagcgtggcaagaacaagcaggtggtcctgatgctggtcaaagagtgcaagcagctctcaggcaaagtcatagaggaggcccagaagctcgaagacgtaatggccaaactggaagaggaaaagaaaaagacgaatgaattagaagaggaactctccgctgagaaacgaagaagcacagaaatggaagctcagatggaaaaacaactctctgagtttgacactgagcgggaacagcttcgtgccaagctgaaccgggaagaagcacacaccactgacctcaaagaggagatagacaagatgaggaaaatgattgagcaactgaaaaggggaagtgacagcaaaccaagcctctctcttccacggaagacaaaagataggcgtttggtttccatatctgtgggaacagaaggaactgtgacaaggtctgttgcatgccagacagacctagtgacagaaaatgctgaccacatgaaaaagttgcctttaaccatgcctgtaaaaccttccacagggagtcccctagtttctgcaaatgcaaaagggagcgtgtgcaccagtgccaccatggccagaccaggtattgacaggcaggcttcctatggtgacttgattggcgcttctgtacccgctttcccacctccaagtgcaaacaaaattgaggaaaatggaccaagcactggctcaacaccagatccaaccagtagcacacccccacttcccagtaacgctgcccctcccaccgctcaaacaccaggcatagctcctcagaactcgcaagctccacctatgcacagtttacattcaccatgtgccaacacctctttgcatccaggtctaaacccacgaatccaagcagctagatttagatttcagggcaatgctaacgacccagaccaaaatggaaatactacccaaagtcctccgtcaagagatgtctcgcctacaagtcgtgacaacctagtggccaaacaactagctcggaatactgtgacccaagcactgtcaagatttacaagccctcaagcaggtgctccctcaaggcctggagtgcccccaacaggggatgttggcacccaccctccagttggtcggaccagtttaaagactcatggtgtagcacgagttgacagaggaaatcctcctcctatccctccaaaaaagccagggctctcccaaactccttctccaccacacccccaactcaaggttattatagacagcagcagggcctcgaacacaggggccaaagttgataacaaaactgtggcttcgactccttccagtttgccacaagggaacagggtgatcaatgaggagaaccttcctaagtcatcctcccctcagctgccaccaaaaccatccatagatttaactgtggcacctgcaggctgtgccgtttcagccctggccacgtctcaggctggtcaccctccctaacccctttgctaatgagtggtggtcctgcccccctggctggcaggcccacccttcttcagcaagctgctgcccagggaaatgtcactttattatcaatgctgcttaatgaagaaggactggacattaattactcctgtgaagatggccattctgccttgtattctgctgctaagaatggacatacagactgtgtgagattgctgctgagtgcagaagcccaagtcaatgctgctgataaaaatggcttcacacccttgtgtgctgcagctgctcagggacatttcgagtgtgtagaattattaatttcatatgatgctaacattaatcatgctgctgatggaggacagacacctctatacctggcctgtaaaaatggaaataaagaatgtattaaactcttgttggaagctggaaccaatcgaagtgtaaaaaccacagatggctggacaccagttcacgcagctgtggacactggtaatgtggacagcctcaagcttcttatgtaccatagaataccagctcatggaaattctttcaatgaggaggagtccgagtcaagtgtctttgacttggatggaggagaagagagtcctgaaggcatatccaagcctgttgttcctgcagacctcattaaccacgccaacagagaaggctggactgctgcccacattgctgcttccaaaggttttaagaactgcctagaaatcttgtgtaggcacggagggcttgagccagaaaggagagacaagtgcaatcggactgtgcatgatgttgccactgatgactgcaagcatttgctggagaatctgaatgctcttaaaatacccttaaggatttcagtgggtgagattgaaccaagcaactatggttctgatgacttggaatgtgaaaacacaatatgtgctttaaatatccgcaaacagacatcatgggatgatttttcaaaagcagtgagtcaagctctgacaaatcatttccaggcaatctcttctgatggatggtggagtctggaagacgtgacttgcaataacaccactgattccaacatcggcctcagtgcaagaagcatacgatccatcacgctaggaaatgtgccgtggtcagtgggtcagagcttcgcgcagtccccgtgggactttatgaggaagaataaggcagagcacatcactgtgcttttgtcaggtcctcaagaaggctgtctcagtagtgtgacttatgcctccatgatccctctccagatgatgcagaactacctcaggctggttgagcaatatcataatgtcattttccacggcccagaaggaagcttgcaagactacatagtacatcagcttgcactctgcctgaagcacagacaaatggctgcaggattctcctgtgaaatagtgagagctgaagtagatgctggtttttccaaggaacagctactagacctgttcattagtagcgcttgtctgatcccagtgaaacaatctcccagtaagaagaaaatcatcatcattttagaaaatttagaaaaatcttcactgtcggagttattgagggactttttggcacctcttgaaaatcgcagcactgaaagcccctgcactttccaaaaaggaaatggactgtccgaatgttattactttcatgagaactgctttctgatgggaaccatcgccaaggcctgtctccagggctccgacttgctggtgcagcagcatttccgctgggtgcagctgcggtgggatggcgagcccatgcaaggactgctgcagaggttcttacgaaggaaagttgtgaataagttcaaaggtcaggcgccctccccctgcgatcctgtgtgcaagattgtcgactgggctctgtccgtctggcgtcagcttaactcctgcctggcccgcttgggcacacctgaagcacttcttggaccaaaatatttcctgtcttgtcctgtagttcctgggcatgcccaagtgacagtgaagtggatgtctaagctgtggaatggcgtcatcgcacccagagttcaagaagcaatattgtcaagagcctctgtgaaaagacaacctggctttgggcagacaactgctaaaagacaccctagccaaggacagcaggctgtggtcaaagctgctctcagcatcttgctaaataaagctgtactgcatggctgtcccctccccagagcagagctagaccagcatacagctgatttcaaaggaggaagtttccctttatccatagtttccagttataacacttgtaacaagaagaaaggagagagtggtgcctggagaaaggtgaacaccagtcctcgcaggaagtctggccgcttctctttacccacctggaataagccagacctaagcactgaaggtatgaaaaataagactatatcacagctgaattgtaacaggaatgcttctctgtcaaaacaaaagtctttagagaatgatctatcactgacgttgaatttggatcagagactctctctgggttcagatgacgaagcagatcttgtcaaggaacttcagagcatgtgctccagcaagtctgagtctgatatcagcaagattgctgattccagggatgatttaaggatgtttgatagttctggaaacaaccctgtactttcagcaactattaataatctgagaatgccagtgtcacaaaaggaggtcagtcctctcagcagccatcaaactactgaatgcagcaacagtaaatcaaagactgagttgggtgtttcaagagttaaatcttttcttcctgttcctagaagtaaagtcacccagtgttcccagaacaccaaaagaagcagcagcagcagtaatacaaggcaaatagaaatcaacaacaactcaaaagaagtgaattggaacttacacaaaaatgaacacctagaaaaacctaacaaataggcctgcctacaatattctcattattaacttcctctatttcacacagaaaccaaggacaacaagatacaaatacctttaaattgataaaatgttttcactgtaatataaattatgagtgcgggaccactattcaatttttttttgtaaagaatgtatttataaccaacattttgttgcttttttttttaattctgtaggattgaacttcaataccaggaagttatgccaacttttcaagtagttttataatagaaaaattgtaatagttttaatcaagatgttcaggggtattaaaacagaactgtgtactgtatatctgtatatatgtatatatgtatgtatatttaaggaagtccagaaatcatactgcatacatgctacaaaaaagtagcaaaaaagtacaaagttggcttagataacttgtaccattttaaatggagatcataattttatgttcacttgatggggaatgactagaatggggcaataacaaatcatttctaaacagttattttccattaaaagccatattaagtattttgcttgttaaattctagttttatgttttaaatctcttagtggttacattgccatttggtagcatcatgtatatatttatgcttataagtttgcattatgactcctgtaaaatatgaaattataatgcaataaaagtgttatctttcttacaaaagttttgtacctaagtggatatagataactgcataaatgaataaattcagaattaactccttcaatatttctagtagcacaactgataatattgatattttctacaaatgttacttctaaaattacagacaaaattacttacacaattcagttaagatgctttgacactgaataaaatattgatttcatg

SEQ ID NO: 89 - DNA, 5337 bp, Homo sapiens
cggaccattgtgccaaatgcaccggccactatccccctgctggccgtagccccaccgggcgtggctgccctgtccattcattctgccgtggcccagctcccaggccaacctgtgtacccagcggccttcccacagatggcgcctactgacgtccctccttccccccatcacacggtgcagaatatgagggccacccctccacagccggcactgcctccacaacccacactgcccccacaacccgtgctgcccccgcaacccacgctgccccctcaacctgtgttgcccccgcaacccacacggccccctcaacctgtgctgcccccgcaacccatgctgcccccacaacctgtgctgcccccgcagccggcactgcctgtgcgccctgagcccctccagccccaccttcctgaacaagctgctccagctgctacaccagggagccagattctgcttggccacccagctccctatgctgtggacgtcgccgctcaggtccccaccgtgcctgtgccaccggctgcggtcctctccccgcctctgccggaagtgctgctgcctgccgcccctgagctcctgcctcagttccccagctccctggccacggtgtctgcctctgtgcagagtgtgcccacccagactgccacacttctgccaccagcaaacccaccgctgcctggcgggcccgggatcgccagcccttgcccaactgtccagctgacggtggaaccagtccaagaggagcaggcctcacaggacaagccgcccggcctcccgcagagctgtgagagctatggaggttctgatgtcacttctggaaaagagctgagtgacagctgtgaaggcgcctttggagggggcaggctggagggcagggcagcccgaaaacaccaccgcaggtccacgcgtgcgcgctcccggcaggagagggccagccggccccggcttaccatcttgaacgtgtgcaacactggggacaagatggtggagtgccagctggagacacacaaccacaagatggtgaccttcaagttcgacttggacggggacgcacccgatgaaattgccacgtatatggtggagcatgactttatcctgcaggccgagcgggaaacgttcatcgagcagatgaaggatgtcatggacaaggcagaggacatgctcagcgaggacacagacgccgaccgtggctccgacccagggaccagcccgccacacctcagcacctgcggcctgggcaccggggaggagagccgacaatcccaagccaacgcccccgtgtatcagcagaacgtcctgcacaccgggaagaggtggttcatcatctgtccggtggctgagcaccccgcccccgaggcccctgaatcttcgcccccacttcctctaagctccctgccgccagaagccagccaagattcagcgccctataaagaccagctgtcctcgaaggaacaacccagctttctagccagtcagcagctcctgagccaggcgggccccagcaaccctcctggggcacccccagcccctttggccccctcctcccctcctgtgactgctctgccccaagatggagcagctccagccaccagcaccatgccagagccagcgtcaggaactgccagccaggcagggggtccagggacacctcaggggctgaccagtgagctcgagacgtctcagccactagcggagactcacgaggccccgcttgctgtgcagcccctcgtggtgggcctagcaccttgcactccagctccagaggctgcctcaaccagggacgccagtgccccaagggagcccctgccacctcctgcacctgagcccagcccccacagcgggaccccacagcccgccttgggtcagcctgctcccctgcttcctgccgcagtgggggccgtcagcctggccacctcccagctcccaagcccacccctggggcccaccgtccccccacagccaccctcggccctggagtcggatggggaagggccgccccccagggtgggctttgtggacagcaccatcaagagcctggacgagaagctgcggactctgctctaccaggagcacgtgcccacctcctcagcctcagctgggacccctgtggaggtgggcgacagagacttcaccctggagcccctgagaggggaccagccccgctcagaggtctgcgggggggacctggccctgcccccagtgcctaaggaggcggtctcagggcgtgtccagctgccccagccttggtggagaagtcagaactggcccccactcgaggggccgtgatggagcagggcacgtcctcgtcaatgacagagtcgtctcccaggagtatgctaggctatgacagagatggaaggcaggtggcctcagactcccatgtggtccccagcgtcccccaggatgtacctgcttttgtgagacctgcacgtgtggagcccacagacagggatggtggagaagctggagaaagctcggcagagcccccgccgagtgacatgggcacagtgggggaccaggctagccacccccagacactcggcgctcgagctttggggtcccctcggaaacgtccagagcagcaggatgtcagctcaccagccaagactgtgggccgtttctcggtggtcagcactcaggacgagtggaccctggcctccccccacagcctgagatactctgccccacccgacgtctacctggacgaggccccctccagccccgacgtgaagctggcagtgcggcgggcgcagacggcctcctccatcgaggtcggcgtgggcgagcccgtgtccagcgactctggggacgagggccctcgggcgagacccccggtgcagaagcaggcgtccctgcccgtgagtggcagcgtggctggcgacttcgtgaagaaggccaccgccttcctgcagaggccttctcgggccggctcgctgggccccgagacacccagcagggtgggcatgaaggtccccacgatcagcgtgacctccttccattcccagtcgtcctacatcagcagcgacaatgattcggagctcgaggatgctgacataaagaaggagctgcagagtctgcgggagaagcacctgaaggagatctcggagctgcagagccagcagaagcaggagatcgaagctctgtaccgccgcctgggcaagccactgccccccaacgtgggcttcttccacacggcaccccccactggccgccggagaaaaaccagcaagagcaagctgaaggcaggcaagctgctaaatcccctggtgcggcagctcaaggtcgtggcctccagcacaggtcacttggctgactccagcagaggccctcccgctaaggaccctgcccaagccagtgtggggctcactgcagacagcacgggcctgagcgggaaggcagtgcagacccagcagccctgctccgtccgggcctccctgtcttcggacatctgctccggcttagccagtgatggaggcggagcgcgtggccaaggctggacggtttaccacccaacgtctgagagagtgacctataagtctagtagcaaacctcgtgctcgattcctcagtggacccgtatctgtgtccatctggtctgccctgaagcgtctctgcctaggcaaagaacacagcagtaggtcctccaccagcagcctggccccaggccctgagccaggcccccagcccgccctgcacgtccaggcgcaggtgaacaacagcaacaacaagaagggtaccttcacggacgacctgcacaagctggtggacgagtggacgagcaagacggtgggggccgcgcagctgaagcccacgctcaaccagctgaagcagacccagaagctgcaagacatggaggcccaggcaggctgggctgcccctggcgaggcgcgggctatgaccgcacctcgagcaggagtggggatgccacgtctgcccccagcgcccggccctctgtccaccacggtcattcccggagccgccccgaccctgtccgtgcccacaccagatggcgccctcggaaccgcccggagaaaccaggtgtggtttggcctccgagtcccccccaccgcctgctgtgggcacagcactcagccgcgagggggacagcgggtgggcagcaagactgcttcctttgcggcttcagaccctgttcgctcctaggttcctgtggtccacgcgccgtctccacacccacttcctatacttgagttgatggttagaaccttgtcgtcaccctgcagaagtacagtgccttgaatgccagcttttccgttccctgatgaaaagatatgttaaaaaaaattatcggaaaaggtttcatttgcaattggcttgtgcattgataatctttatttactgttttaagttgcagagatgtgaatggtttacaaatctgaagctgaagttcaatctttggttttctgttgtaaatgccttttacaaacattgaattagctaccttaagtattgaagagcttccattgctaggtgagccctgctttgtcctcagtagagtgccggttccctgggctcatccaggggctgagagatggcgggacgctggggcagggcacactggcggagctgcttgctcagtagggaatgtcagttgttgcgctgggccatgagaaatccgccagaaaacgttaggtgagcagacatgccccccatgccagtgggctgctgtgagtgaggataaggtgtgtgttgggcatagaaaccctggctgcccgcccaccctgtggagacaagtgcagctcctccagctggagaggctgccctctctcctgcccacttccctcccttctccatgatttccatggagacctgtggctctgctcacccctggcatgcagaccgctctcccgtccagccctaagcctgctctgcggagggcggggtcattcttctcctggagatttcagtgggactcgtccccagtgggcacaacacagcccttggtgggaggggaaggccccagcctcctccacctcccactggaaagcagactgcttgggactgcccagctgtgaattgtatagtttctgtacttattagaactgggtaaattattttggttcaaatctattattccatcaattcagttagaattgaattttctaggtgattatgcagaatcttctgccagggcacgatgctgtcgtaagagatttctgttctctgtactgggcccccttgccctgttccttgagtgaagtgggggctgccctcacctgtcccccttgcctgtgaatcccttccttgtacatggtggtcagtggcacggaatccccaatagattgtatatctgaaggagaaaaataaacacttttgctcg

SEQ ID NO: 90 - DNA, 5142 bp, Homo sapiens
gaagaatatgaacaggatgagagagaccagaaagaggagggaaatgattatgacactcgaagtgaggccagtgactctggttctgaatctgtttccttcacagatgggtctgtcagatctggttcaggcacagatggatcagatgagaaaaagaaggaaaggaagagagctagaggcatatctccaattgtttttgatagaagtggaagctctgcatcagagtcatatgcaggttcagaaaagaagcatgagaaattatcatcttccgttcgtgctgtccgaaaagatcaaaccagtaaactcaaatatgtgcttcaagatgcaagatttttcctcataaagagtaacaaccatgagaatgtgtctcttgccaaagcgaagggtgtatggtccacgctccctgtaaatgagaagaaattaaatcttgcatttagatctgcaaggagtgttatcttaatattttctgtcagagagagtggaaaatttcaagggtttgcaagactttcttcagaatcacatcacggaggatctcctatacactgggtgcttccagcaggaatgagtgctaaaatgctgggaggtgtctttaaaattgactggatttgcaggcgtgaattacccttcactaagtcggctcatctcaccaatccttggaatgaacataaaccagtaaagatcggacgtgatggacaggaaattgaacttgaatgtggaacccagctttgtcttctgtttccccccgatgaaagtattgacttgtatcaggtcattcataaaatgcgtcacaagagaagaatgcattctcagccccgatcacgaggacgtccatcccgtcgagaaccagtccgggatgtgggaaggcgtcgaccagaagattatgatattcataacagcagaaagaaaccaaggattgactatccccctgagtttcaccagagaccagggtatttaaaggatccacgataccaggaagtggacagacgattttcaggagttcgccgagatgtgtttttaaatgggtcctacaatgattatgtgagggaatttcataacatgggaccaccaccaccttggcaaggaatgcccccttacccaggaatggaacaacctccacaccatccttactatcagcaccatgctccacctcctcaagctcatcccccttactcaggacatcatccagtaccacatgaagcaagatacagagataaacgagtacatgattatgatatgagggtggatgatttccttcgtcgcacacaagctgttgtcagtggccggagaagtagaccccgtgaaagagaccgggaacgagagcgagaccgccctagagataacagacgagacagagagcgagatagaggacgtgatagagaaagagaaagagagcgattatgtgatcgagacagagaccgaggggagagaggtcgatatagaagataatgggcttttggaagcactgattgtttaaagatacaaaaaatcttgtattttttttttgtgtgtgtttacaagtagtaaatttattttcagctgtctgcctatgaagttcattgtgtagaaggatttattatgaccccctttgttccaagcatgcagtatcataagaactggaaaaactcaaatccgccaaaaatccacagctgacagttgaattgacacttttattggggcagaatggaacagtccaagaatgtagatactgattctttctccataaatgttcttatagtgtgttcatcctagagttatttttttgtttgtttttttcctttttggatcttgattgataactgccatgatattttgctttgatgtgtttctacatgtagttgcacacggttcagtaaaaataatgctgctatcgagtatgcaaatattgaagtatgatggtttgactgtatggcagtgttgtagcagcctcttgtttttttccccattgcctctttttttaaaaaacttataaagtcactttttatttttcctcagtcttcaatgacgagagcaatattaagaagacattgctatctaatttttaatctttttaaatgaaaaattcctatgttcagtagcgtggttgatgctattgtttagccttcccctccaaattgtatacattggcttggaatgttcacaacttgcgtgcgtggcagcggaagacgattcccatattctacattgctactgttttgtataaaataaattggtaaagattgacggttatcttttgtatctttttcttatccaattgcaggtttgttttattatgcaataatggacataaaagcatgctttttgttcaggaattttaggaaccccatttgctttttttgaggcacgctttagcagaaatgattgacctaggcctgttgcattaaaagcttacttctatttctaacataagatacacagagttatgttaataatttggttaagtatttatacacctgataacattttgagtctactctgatcacagaatcgtttatttaggttttctatttgttgttttagtcttctgtaagtgaacgactttgtacatgctttctactttacttcataaatggacttttaaccctcttgtattagttctgtattttaagttaactgtccagttctcccagtggtaaccaactataacatagaaatagagccgctcaagaaaacagtttatgaaataatttttttgaattttttcttgagttacacctggagttttggcctttggaatttggcctttataaacattaggaatatttgaatgtttgatttttttatagtatcaacagttgtactgtgtaccagatcacatagtacagttttacatttaatctatattggcctgaaaagaacaacacaggcactttactcttaaaggatataataaactatagttatactgcattcatattcataccagcatgtagtatctttccctgcattcacagaagttttatttacaatgacaaaactaaagcctgaggatttgttttaaatctgcattgtggtagagaggaaaaagtacttttaaggaaacctgggttctagttttgtcattgtctttaattaaaccggttagtgatacatggtaagtcacttcattggcattttgtgtattcatcagtaagctagacaagatgatagctacagtttaagaatttctgtaaccattatacaaaactggtaggtaatattaaaggtattttcctgaaataataggaataaatactgagcactttgtatgcaatagagactttgtgcttttatatacagactcatttaaatgggctcagagaggctagtaaacttgcccaagattagaaaggtagtaattgatgggccaagattttacccatgtttttatttggtgtttctaaaccacctcatcacttttgaaaaaacagtatataaattaataaatgttttggagatggagtctgtcgcccaggtggagggcagtggcatgatcttggctcactgcaacctcctgcctcagcctcccgaatggctgggactacaggcacccaccaccacaccccgctaatttttgtaattttagtagagatggggttccaacatgttggccaggctggtctcaaactcgacctcaagtgacctcacctgcctcagcctcctaaagtgttgggattacaggcgtgagccactgcacctggcctgagatttttaaacattaacatttccttcaggcttaagcagaggatttttctaaagtgccatccaattagatgttaagttatgctttgtatgttgagcttagtattgagtcgatctattttaaaaagccaacattaagtttttaccaagtatctggcactattctaaacaattctcttggctcacataatcatcactgttttctcctttcctaatttttaaaataaacttaccggaacattgtataaaaaatgcaagatttttttctgtacagaagagtcagtatataaaaatcagtatgttttatttaatattcgtacacatgacagcttttgtcactgtgagaagacatggtttctttcgtgtactccactgtgctgtgattctaacaatctacattagtatgatgtgttcagatgaaaaacagaaaattcagtcattccgagtttagaaatccggtcagggattttattggctggagtaatagttcaaaggagtgaaaattcaagcatgtaatttttggatttgatttcctccataatgatttcctccataatggctttttttcaagcatggtctaatttttcagaaaatggccattatctccaagcttccattgtccatgtagtttcagtggcaggagagagactattttcctcccagtgtccatgtcagttccccaaaaggactgaatagccatgttggttttggagccagccgtaatccaatctgtatttccaaggaaatggggttctttgtctcccagcattgggaagcaagagaggcgcatgttatggtcacctctgtgaggattacatcaggaaggacagtctccaaaagacatggacagaggaaatttagcagatgtccattaaatcaggatctcatacaagttataacacctgaatgtttgacttttcagagtattttgccatcacaggtgtggcatcttgcccttggatatatctacattctgctgtagaatgtcgtggtctttctgagggtcacatacatcctgtcttgtcataatgttaaccattaagagtcctcaggggcatggaattgaagaaggaactgttgccagcagttaactgaccaagctagagttccctgacccaacgtaagggtgactgtgacacacatggataattttagcttcatgtttaagattttgttatttgggtaggaaacattccaaatgcagtttgaaacacatattaaaattgaggcacacaggaaagaactggctcaagtttagtccccaagttccttatagtaggaataggaatccttagagtataagcaatccatgcatagtattctgttatctatcatgtagatcatttaatctctaattttttggggtggggattctcttgtttctaaatcttacactttcagtttcttctgtgtcttaaatatagattattgactgttgtcttaaatactaataaatacattaaatgt

SEQ ID NO: 91 - DNA, 3996 bp, Homo sapiens
ggcgccggcggcctctacaagcgcggctcggtgcgctcgctcagcacctactcggccgccgcgctgcagtccgatctggaggactccctgtacaaggcggcgggcggcggcggcccgctgtacggcgacggctacggcttccgcctgccgccttcgtcaccgcagaagctggccgacgtggcagcaccccccggaggtcccccgccaccgcacagcccctactcggggccgcccagccgcggctcgccagtgcgccagtccttccgcaaggactcgggctcctcgtccgtctttgccgagagtcctggagggaagacccgcagcgcggggagcgcctcgacggccggagctcccccttcggagctcttccctgggcctggggaacgctcgctggttgggttcgggccgccagtgccagccaaggacacggagaccagggagcgcatggaggccatggagaagcagattgccagcctcacaggcctggtgcagagcgccttactgcgaggctctgagcctgagacccccagcgagaagattgaaggctccaatggagcagccaccccctcagcaccctgtgggtcaggcggccggagcagcggggccaccccggtgtccggcccgcccccgccctcggccagcagcacccccgcaggtcagcctaccgccgttagccggctgcagatgcagcttcacctgcgaggcctgcagaacagcgccagtgacttgcgcggccagctccagcagttgcgcaagctccagctacagaaccaggagtcggtgcgcgcgctgctgaagcgcacggaggcagagctgagcatgcgcgtgtcggaggcggcgcggcggcaggaggacccgctgcagcggcagcgcaccctggtggaagaggaacggctgcgctatctcaacgacgaggagcttattacccagcagctcaatgacctggagaaatcggtggagaagatccagagagacgtgtcccacaaccaccggctggtgcccggccctgagctggaggagaaggcactggtgctgaagcagctcggggagacgctgacagagctcaaggctcacttcccgggcctgcagagcaagatgcgggtggtgctgcgcgtggaggtggaggcggtgaagttcctgaaggaggagccccagcgcctggatgggctcctcaagcgctgccgcggggtcacggacacgctggcccagatccgaaggcaagtggatgagggtgtgtggccaccccccaacaatctcctgagtcagtcccccaagaaggtgacggcagagactgacttcaacaagagcgtggacttcgaaatgccaccccccagccccccgctgaacctgcatgagctgagcgggccagctgaaggagcctctcttacccccaaggggggcaaccccaccaaaggcctggacactcctggcaagagaagcgtggacaaagctgtgtctgttgaggctgcagagcgagactgggaggagaagcgggcagccctgacccagtacagtgccaaggacatcaaccggctgctggaagagacacaggcagagctgctcaaggccatccctgacctggactgtgccagcaaggcccatccaggcccggcccccactccagatcacaagccccccaaggccccccacggccagaaggcagccccccgaacggagcccagtgggaggaggggctcagatgagttgaccgtgccccgataccgcacagagaagccctccaagtcgcccccaccgccccctccccgccggagcttcccctcctcccatggcctgaccaccacacgtaccggagaggtggtggtcaccagcaagaaggactcggccttcatcaagaaggctgagtccgaggagctggaggtgcagaagccccaggtgaagctgcgccgggctgtgtctgaggtggcccgcccagcctccacaccacccatcatggcctcggccatcaaggacgaggatgacgaggatcgcatcatcgcagagctagagagtggcggaggcagtgtaccacccatgaaggtggtgactccgggggcctctcggctgaaggcggcccagggccaggcgggcagccccgacaaaagcaaacatggcaagcagagggccgagtacatgcggatccaggcccagcagcaggccactaaaccatctaaagagatgagcgggtcgaatgagacctcgagcccagtctcagaaaagccctcggcttccagaacctctatccctgtattgacttcctttggggcaaggaattcttccatctccttctagaagcccctcaccccgctgccccgcctgtccccctccctcactcctgccatttctcccctctcttccttcatctccaccccaccccaccctactctccagacgccctgaggggtgtgccctgaagaggagggtgcggccctcctcagcgacccctacccatcatctgttggtgtttttggttttgttttttttttttttttaacaattaacttttaattatctttttttaaacagtaaaactaaaaaccaaacacaccaccttccttgatcccagctggcctctcgctggccgcacctgtcacatctctccttcttctctttcaccactctttcccccagtccatcctgaagctcctgcacccccttcccgccttcccctcacttcccaagaatactccaaacaaactctgaaccacggagacttggagcagtgggagacccctctcccgtttctcgataccttcctggaggaacgcggggacatcggaccaacccatacatcaagccagagagcggggcttagggagactggccttggagatgccccactccctgtctaagctccgacaagactgtgacttcctctgtggctgctctgcctcctcccactcacacccaagtgggcctggagtagagacggacaggctggagacgaggccggagtttgagaggcctcagggtgggtgtgaggccatggagtctgtatccctggggaggcgctggcctcctgggccttgccgtccagtggggagtggagggcagaggccctttggtctgctggctgtggagggtgggttgcacggacagccggatatcggggacactgccttgggagagggcggcccggacgggtatttggtacttttagtttcctgatttagcactttaaatggcattaacttattgaatggggatggggtgggcaagagtgaggggcctagaaaaccaggttttgtggcttgcagttgggggaagggtctggtttgagggaaatgggagggtcgagaggggcttgacggggagcactgaagacacctgggacccgcaggtggggtgacttgaacttcagtcatcctcttggcaatttgagggttttcccaggaaaggatgagacgtagtttttcaatggggctctggtgaccctggtgagatgtctgaaggtccctgaggcctgaccatccagccagcgcccctggcctgtggacgccctgcctgccctgcagaggcggttggcagtgccgcctggcttttggccgggtcctggggaggcagagagaggccaattttggttctcactcctggccccccagagggcacagtgaggagccggtagggagaggataggagaagaggaggaggaggagcggggtccccggccgcaggattcccacttggagcacaaagtgaagtaagcacaggggagggggactagaatcagtcccccatagcaagcacagaaaggaggagctgcgcagaaggcagagccccccagaccctggggcctggctggggaaggtccgcacctggggagagctgggagctgttgaaggtttggggggaggggaaacgggttgtgtttcttcatttctttttttgtttttgcctttgttggttcatccttgttttctagctttggatcatttttgtaccaaggcgagcaagcctttttgaaaaataacaaaagaggaaaaaaaaaatccctcctgg

SEQ ID NO: 92 - DNA, 5054 bp, Homo sapiens
gggaaaaaaaaaaaaaactgtccaccaagaattctatacctaaatatcttttaagtgaaggtgacataaagatgtttccaaacacacaacagctgaactagttcattaccagcagaccttcactgaaagaaatgttacagatgctttaggctgaaggaaaacaaaaccatgtggaagtctggatctatacagaaaattgaagagtactggaaatggtaactacatggattcaacacaactgcaatcaaaatcccagcaggctattttgtagaaatcgagaagctgatcctgaaattcatatagaaatgcaaaggacctggaataattaaaacaacttcaacaatgaaaagcagagtttggggactcgcagtgcctgattgcagacccggtgcatttggactcactgtggcgtggggtcccagatgggaggaagcttcctgagaggtgacgcctgagttgagtctaagaggacaaggagtgcggcaccttcccgtctgatgctggcgttgtgcgtatggtgccctgacgtctgtccacgtgggcgcggaagcaaacagcgatgtcccagacgcaggactacgagtgcaggagccataatgtcgacctgccggagtcgaggattccagggtcgaacactcggttggagtgggtggagatcatcgaaccgcgcacccgcgagcgcatgtacgccaacctggtcaccggtgagtgcgtgtgggacccgccggccggcgtccgcatcaagcgcaccagcgagaaccagtggtgggagctgttcgaccccaacacgtcccgcttctactactacaatgccagcacgcagcgcacggtgtggcaccggccgcagggctgcgacatcatcccgctggccaagctgcagacgctgaagcagaacacggagtccccgcgcgcctcggcggagagcagccccgggcgcggcagcagcgtcagccgtgagggcagcaccagctcctccctggagcccgagcccgacactgagaaagcgcaggagttgccagcgagggccgggcggcccgcggcgtttgggacagtgaaggaggacagcggcagctcttcaccaccaggagtgttccttgagaaggactatgagatttaccgggattacagtgcggacggccagcttcttcactacaggacctcctcgctgcggtggaactcgggcgccaaagagcgcatgctcatcaaggtcgctgatcgggagcccagcttcctcgccgcccagggcaatggctacgccccagacggcccacctggggtccgctcccgcagaccctccggcagccagcactcacccagcctgcagaccttcgccccggaggctgacggcaccatcttcttcccagagaggaggccgtcacccttcctgaagagggccgagctcccagggagcagctccccgctgctggcccagccccgaaagccctccggggactcgcagccctcctccccgcgctatggctatgaacccccgctctacgaggagcccccagtggagtaccaggcccccatctacgatgagccccccatggacgtgcaattcgaggctggcgggggctaccaggccggctctccccagcggtcgccgggccgtaagccccggccgttcctccagcccaacaagcagggccccccctcgccctgccagcagctggtgctcaccaagcagaagtgtcccgagcgcttcctgagcctggagtacagtcccgccggcaaggagtacgtgcggcagctggtctacgtggagcaggcgggctccagccccaagctgcgcgccggcccgcggcacaagtacgcgcccaaccccggcggtggttcgtactccttgcagcccagcccctgcctgctgagggaccagcgcctgggcgtcaagtccggagactacagcaccatggagggacctgagctgcggcacagccagccgcccacgccgctgccacaggcccaggaggatgccatgtcctggtccagccagcaggacaccctgtcctccacaggctactccccgggcacgcgcaagcggaagagcagaaagccctctttgtgccaagccaccagcgccacccccactgagggccccggggacctgcttgtggagcagcccctggccgaggaacagcccccgtgcgggaccagcctcgcccccgtgaagcgagcggaaggtgaggccgaaggggcgcggggcgcggccgagcccttcctggcgcaggctcggctggcctgggaggcgcagcaggcccacttccacatgaagcagaggagcagctgggactcccagcaggacggctctggctacgagagcgacggcgccctgccactgcccatgcccgggccggtggtgcgggccttcagcgaggacgaggcgctggcccagcaggagaacaggcactggaggaggggcaccttcgagaagctaggcttcccccagatcctgctggagaagagcgtctccgtgcagaccaacctggcctcaccagagccctacctccacccctcacagtctgaggacctcgctgcctgtgcccagttcgagagcagccggcagagccgcagcggcgttcccagctccagctgcgtcttccccactttcacgctgcgcaagccctcctcggagacggacatcgagaactgggcctccaagcacttcaacaagcacacgcagggcctcttccggcggaaggtgtccatcgccaacatgctggcctggagcagcgagtccatcaagaagcccatgatcgtgacaagcgaccggcacgtgaagaaggaggcctgcgagctcttcaagctgatccagatgtacatgggtgaccggcgggccaaggccgacccactgcacgtggccctggaggtggccaccaagggctggagcgtgcagggcctgcgggacgagctctacatccagctgtgccggcagaccaccgagaacttccgcctggagagcctggcccgcggctgggagctcatggccatctgcctggcctttttcccgcccacccccaagttccactcctacctggaaggctacatctaccggcacatggaccccgtcaatgacactaaaggggtggcgataagcacgtatgccaagtactgttaccacaagctacagaaggcagccctgaccggggccaagaaggggctgaagaagcccaacgtggaggagatccggcatgccaagaacgccgtgttcagcccgtccatgttcggcagcgcactgcaggaggtcatgggcatgcagagagagcgctaccccgagcgccagctgccctgggtgcagacacggctctctgaggaggtgctggcgctcaacggtgaccagacagagggcatcttcagggtccctggggacattgacgaggtgaatgccctgaagctgcaggtggaccagtggaaggtgcccacaggcctggaagacccccacgtccctgcgtccctgctgaagctgtggtaccgggagctggaggagcccctgatcccgcacgagttctacgagcagtgcatcgcgcactacgacagccccgaggcggcggtggccgtggtgcacgcgctgccccgcatcaaccgcatggtgctgtgctacctcatccgcttcctgcaggtcttcgtgcagccggccaacgtcgcggtcaccaagatggatgtcagcaacctggccatggtgatggcgcccaactgcttgcgctgccagtccgacgacccgcgcgtcatcttcgagaacacccgcaaggagatgtccttcctgcgggtgctcatccagcacctggacaccagcttcatggagggtgtgctgtagcgggggcgcccggggacaggagggatgtcctgccgcccccagccaggccgaactccgcactcgctctcccggcagaggggccagaatcgcccggcccagccctggagccccctccactcccccaggcccctggccccggcgctccccacgtcttctgcctggtctgagggtgcagccagggcacagcagcggcggggagggcgcctctggccccccacctcacggccagttcccgcgggcaccgcctcgccctccgctggccgcgggtcagctccgagaaagtgccttctgtgtcctggagccgagcgacgctgcctccttggggccgggctgcctccctgtggctcctgcgcgccctggcctgggccttgcccagccgccccggtctctccttccctttctcctgtcctcgtcctggcctgcagctcttcccagccccgagagagcttcccgacctgtccccgcctcctctccctccctcggcccgtggtccccagctggtgactgctcaggagtttgggggctccaggacagtgggcccggggcctggcaggctctcggtgggtggggtgggggcccccaaaccaaagtcctctggggtagggagcagggctgggcaggcattctgggggcagggtgggggaggggcgagagtatttttttcttcgtgtaactgtaaatccagaatctatcctgcatcgcagcccaccgtgtatagagatataaatagagggaaagatataagaactaaatttgctaatgacatagttttaacctaaatgctatttatctctgagccgtccccgtcctccgtgcagagcaagttgaggtcattccttcttttcttctccgatcttttttcttggcttctgaccaaaaaccaagctctaccccatccccatcccagacctgcaggagacgagcgagcgggaaggcgccgggcccgggactgtccgttctcggggccagagctgctgggggaccgagtttgtacattttccattttggaattttgagttccaattgttgtaaaacttaatttctccccagtttttatatatatattttttagagttccgtttttatttattaaaaacaaaagccccagccctgccgaggcctgggcggcgtcctcagtcgggtggtcccggggcctttgcggtcccgcccggctgagacgctcgccccgacgcatggacccgagaggcgacgacacgagtgaataaagtgcacatggaccctg

SEQ ID NO: 93 - DNA, 4292 bp, Homo sapiens
ctcgctttcttctaggcgcgtttcctgaaggtcgatggccaggtggtcttcataaactatactgccttgtgatgcctccctagaaatgagaggtctcaataccagctcagaccatgtggaccgcggatgagattgctcagctatgctatgaacactatgggatcaggctgcccaagaaggggaagcctgagccaaaccatgagtggacattattggcagcggtggtgaagatacaatctccagctgacaaggcctgcgacacccctgataagccggtgcaagtgacaaaggaagttgtgtcaatgggaacaggaacaaaatgcataggacagtccaaaatgaggaagaacggtaccttctccaccaactccagttggcagccaccctgaaagaggatagcatctttgtcccaggaactcaaaaaggagtgtggaaacttagacgagacctcatttttgtgtttttctccagccatacaccctgtggggatgcctccatcattccgatgcttgagtttgaagatcagccttgctgtcctgtcttcagaaattgggccaacaactcatcagtagaagccagtagtaacctggaagctcctggaaatgaaagaaaatgtgaagaccctgacagtcctgtaaccaaaaagatgaggcttgagcctgggaatgcagccagggaggtcaccaacggagcagctcaccatcagagttttggcaagcagaaaagtggcccaatctcaccaggcatccacagctgtgatctcactgtagagggactggctactgtcaccagaatagcccctggtagtgccaaagtgatagacgtttatagaactggagccaagtgtgtacctggagaagctggagactccggaaagccgggtgctgcgtttcaccaggtggggctgctccgagtgaagccaggccgtggagacagaacacgctccatgtcctgtagtgacaagatggcccgatggaacgtcctcggatgccaaggggcactgttgatgcacttgctggaagagcccatctacctgtcagctgtggtcattgggaagtgcccatacagccaggaagccatgcagagagcactgattggaaggtgtcagaatgtgtctgctttaccaaaaggcttcggagttcaagaattaaaaatactgcagtcagatttactatttgaacagagccgcagtgcggtgcaggcaaaaagggctgatagcccaggtcgacttgttccttgtggggcagccatcagctggagtgcagttcctgagcagcctttggatgttactgccaatggctttccacagggaacaacaaagaaaacaattggaagccttcaggcaagatcccaaatcagcaaagtggaactcttcagatcattccagaagctgctaagcagaattgcaagggacaagtggccacactccctcaggtgatgctgttgacctatgttttctcatatttaggtagacaactgttttgattctggcttctgagtagcaagaagctttggcaggagtggtggttcagcaagccagtggcacttattgttgaccacaagttcttctttccccatagccctatttgcagatacgtgcatgatctgagatgcagaggatgggtagtttggtggtatagagttataaaaaactaaggatagaactggggcttggccattccaggccctcctttgattccacctctagatggagatcactgtggaaatgggagtgctctaagagcaatatattctgttacaagtgttactcctcttttccttttgaacttgcagctccatgacttaaattgctcttcaaacaaaaattcaaagaactttaaaaccactcttgggaacaggtagatgggtgcagtgacattctgacagtgaccacctagatttaggtgaagtttcacaggtgaaggacacagttcccactaaactgtcttcatttcaaacaactaccacaagttaaggaaagccccaaaccacccatacttctgaccaactggctacaaatttgagtgtctccactccccttcacgttcagtcattcactagaacatctctcagaactcagaaaagcactatagttgccattaaagttttattatgaaggctacagatcagtactagccaaaaggagagagatatagggtaagatatgggagggtcgcaaaggcagagcttccatgtcctcaggacatatcaccttcccagcacattgctgcgcatcaccaactaggaatctcactcagacatcagtgtccaaagtttttgttggagtttcattaactattatgactgattgaattattggccacatgatgtgattgaacttaatctccaacctcctcctctcccaagagttcaaactgatatcacgtgtctcagagccctaattctctacatggttggtctttctggcatggccggtatcatcctgaaactatctcgggggcccaccatgagtcacctggttaaacagaaactcacgtgtgatcagcgagatctaccatgcaggacaaagacacttgcagaaactccaaagcttagaggctcccaggaactggtgacaaagaccaagtgaatccttcattatatgacagtggggaaactaaggagtagctagaaacttctatatgaagaggcatcgccatcatgcatactgaagtgatggatctgtggtcagttggcttctttcttgggtttccatatattctatatgtcaaatctgaatttaggtgaggagatacttctaaggcagagttttgctcctgttaaccaggctggagtgcagtggcacaatttcagctcactgcagcctccgcctcccaggttcaagtgattttcctgcctcagtctccagagtagctaggattgcaggcacccgccaccacgcccggctaatttttggtatatttggtagggacggggtttcaccatattgaccaggctggtcttgaactactgacctcaggcgatccacctgcctcagcctcccaaagtgccaggattacaggcgtgagccaccgcctggcatggtgcagaagctggatacctaccaggagtacaaggaggctgcgtcctcttaccaggaagcctggagcacactccggaagcaggtgtttggatcctggatcagaaacccaccggattatcaccagttcaagtgagaaggaaatgtttgctctggtagcaggacccttcatcctgaactgccttcctccacgcaggacaagtcttagcttttttggtagttaaatcagggaacattctttctgagctttgcatctctgttgtgtaatacagatggaatctggaacttagagcaagctatacttgattgaagtagctctctgctaaaatggcatctcactaatgacctcactatctgacttccattgtgttttattgcttctctaaaatatgaaatcagagtttggaacatgatgctttgaaagtactctgcagcagctctgttttatgggttcctacattgattcagcaaatatttattgagctgaaatgatgtttgacgctctgcaagttttacagctttgcctagcatagcgaacatatattttgtattcccagcctttctttcttcagggagccattcttttcccattcttcagtgatcctgctctgtgcctcagacttggctgaaggtaaccttactccctggctctaggaatagcctgtgagccagccctggactgccctggacttgttctcagaggtatcaggaaaggctttctgttttgatctggagctgtaagggtcacataatcatgggactgccggtggccatcttttcctactacctagagaaagccagcaaagaatgaaggcaacaaaggaaacagccaagagaatcaaagatctagtaacactgtttagatgtctcaattatgtgagacagattcctgttgttattttgattaagcctgtttgtgttggttttctgacttacaattgaaagagttctgtccaaaaagccaaaaggtggccaggcttggtggctcaggcctgtaatcccagcactttgggaagcccaggcaggcagatcacttgaggtcaggagttcaagaccagcctggccaacctggtgaaaccctgtctctactaaaagtgcaaaaactagccgggcatggtggcgcacacctgtaatcctagctactcgggaggctgaggcaggagaattgcttgaacccaggaggcggaggtagtggtgagcaaagatcgtaccgctgcactccagcctgggtgatagagcaagaccctatctc

SEQ ID NO: 94 - DNA, 4816 bp, Homo sapiens
gcgggcggccgagcggagccgagcgcagccgagccgggccgagccgggccgggccgggcccaggagcgcgcggatgatgcgggcggccaggcgggggtcgacgggtccctgaagcccgcgccccgggccagcaagggagccccgcgcaggccgcgcgcatccggaggcggccgggccccgccatggccggggtcagctacgcggcgccctggtgggtgagcctcctgcaccggctgccccacttcgacctgagctgggaggccactagcagccagttccggcccgaggacaccgactaccagcaggccctgctgctcctgggggccgccgccctggcctgcctcgccctggacctcctcttcctgctcttctactccttctggctgtgctgccggcggcgcaagagcgaggagcacctggacgccgactgctgctgcacggcctggtgtgtcatcatcgccacgctggtgtgcagcgccggcatcgcagtgggattctacggcaacggggagaccagtgatggcatccatagggccacctactcgctccgccacgccaaccgcacggtggccggggtccaggaccgcgtgtgggacacggcggtggggctgaaccacacggcggagcccagcctgcagaccctggagcggcagctggccgggcggcccgagcccctgcgagccgtacagaggctgcagggcctgctggagacgctgctgggctacacggccgccatccccttttggaggaacacggcggtgtcgctggaggtgctggcggagcaggtggatctctacgactggtacaggtggctgggctacctgggcctgctgctgctggacgtcatcatctgcctcctggtgctggttggcctcatccgcagctccaagggcatcctggtgggggtctgcctgctgggagtcctggccctggtcatcagctggggcgcgctgggcttggagctggctgtgtccgtgggctccagcgacttctgtgtggaccctgacgcctacgtgaccaaaatggtggaggagtactcggtgctgagtggggacatcctgcagtactacctggcctgctcgccccgcgccgccaaccccttccagcagaagctgtcgggcagccacaaggcactggtggagatgcaggatgtcgtggctgagcttctgaggaccgtcccctgggagcagccggccactaaggaccccctcctccgcgtccaggaggtgctgaatggcacggaggtgaacctgcagcacctcaccgccctggtggactgccgcagcctgcatctggactacgtgcaagcgctgaccggcttctgctatgacggcgtggagggcctcatctacctggccctcttctccttcgtcacagccctcatgttcagctccatcgtctgcagcgtcccgcacacctggcagcaaaagagaggccctgatgaggacggggaggaggaggccgctccagggccgcggcaggcgcacgacagcctctaccgcgtccacatgcccagcctgtacagctgtggcagcagctacggcagtgagaccagcatcccggccgcggcccacaccgtcagcaacgccccggtcactgagtacatgagccagaacgctaatttccagaacccccgctgtgagaacaccccactcattgggcgcgagtccccgccgccctcatacacctccagcatgagagccaaatacctcgccacgagccagcctcgccctgactccagcggcagccactagaccgcgcccggcagccacccaccccacgtgccaacttcccctccccgtgccagcactgccgcttccacctgggccacccaccggaccctcgcacgccgtgccaggcctgccccagacgcgtctgcaggccgcttgccctcctgtcccctccccgcaggggcacagtggagacgcaggggctctgggcccgtaccgccaactcgggtcacacctgaacgctgctgccagccgatgccccagccctgcacgccacccactatcccggcacgctccctctgcagatggtcgccgcacctacaagccctggccgcacccaacctgtgttgttgccgcccggcccttccctccacagctctccttcctcccgcccggcacttctgtggaccccttcttagttcacaggcacggctggggccgctctgtgctggcgcctgctggccactgagggacagggacacgtgccacctgctcatctctgccctgaggtcaccccgtggtccctccacgtgcccatctctctgcagtgccctcctcgcctgtgcagcccgcccacccacaggctcacccctcctgccggctgccagaggccccctccagcagggcctctctccgttgccccagcttcactctctccctcagcacctgccctgctggaggccccagccctccgtggacagcaggggccacgtggagcccgggccgctcacccgccacccagtgctggccgccttcttggtgccaaacccccttcccccacccagagactgggcagctgtgtctggttcgttctttgcactaaccacatttgtcatctctagggcaggctggggctgcgggctgagggggaccgctggcaccccccttccctcccttcttggttccatttccatccatgacaggtacagcatcccaggagcccggcctgaggggctggacccgagctggctgtgaacatccctcagcccctgctgtccccccttgggactaaccactaacctcacccccaaactccacgggtgcccctagctggcccagagccggcagtgtgagcccaagtccgggctggagccgaggccggagcagctgtctgggagtcaaggctgcagtagcgtttcttcatggggtgctccagggggtgccacagaccgacaggcagcccaagggcctggacacccctccccaggcaggtgctgccccaggaggactgtcctcgggaatgaacctcccgcgggctttggactgaggtccctgtggcctcggtctcctccccatgaagtgggagcgaggctccccaatggtgcttttggctttagtgtacgatgtttgctgtgcttcccgccgtggagggcagagccaccccacatcaggatcggacgtgctacccctcccggtcccggccctggcccagccagcccagccctcgaggctcgatgcctgtgccaaggccaggggcagccagagggcagctggatggccacgtgcaggggtcaaggctgggccctgcagtggggcgggccgccagccccagcagtttacagacgcatggctcttcctcccagagcagccggcagctacctggaccggaaatgtcctcatcccctccctggggccaggctctgccctggccttcctctgtgaacccctcctttctttgtgctggtgtctgggaccaaaaagggggaatatgggagggcagagtggggaggggagtccatgggcctggggccccaagccggggcgtctgagctccccaggcatgaccaaacctcagtggaggggcctctgcttcaggccccgcctggctgacattctgagcccccctcggaggccccgccacagccaacctgcccagtctttcctctgggcttgacccgccaggggagttctccaggcctagggccaggagagaggccctggcaccctggcgtgggtgcccgccaaacgccctgcgaccgctcagaagcacaaatgctgtccatggccgtgaggctgcctgccaggtgaatggacatagcgtgagaggcggtgaggccagggcttccagcctcgtgctgtctcgggactcctgaccgtggtgtgcgtgtgtgcccgtctgtgactttctactcaccaaggttgaagaaaggaaacggggaaaatcaaaaggggttcaaaccccacctcagtaggtggaggggagcgcctgccattggttgtatttttgttctgagttttcggtgccgtgttcctaactactccatcccatgacctcgccacacctactggggcatctggctggtgcctgctgccatggccagcccccactctcaccctgcacagggggtcttgcagcccccaggcccacagcctcgttgggaggacagggtggccctggggacaagagggaggagcccaggggcttacctcactgagagtgctccccagcaggcatccactaccccagggccccccacatgtcatggcaaggttggtagtgaatgggcctggttgggagcagcccctggcccattgcccacccacccatctcactatgcaattcgagttccaagcaacatttgctcctgccctggggccagctctgccccagccctgagaggggtggtgaggcagccccctggaccccagaaccccagacaagggggcaggcgggggaccagggcctctcctgtgggatctttgttttgtgtttaaccataatggttgtgtactgaaccacttcatatttgttatatataatatatatatatataatctccttaagactcagcctcctggtttacccccccggcctgggcatctgacctcccccaccccagtgtgatttaacatccaggaactgaggcctgaaccattttgcatttccccctcctccagcctctgtagggccatggctgtatgtactgtcgctgtgtttttttgtttttttagaactgggtttgggggctgatttttatttctttgggggcttttttttcttggcaaatactaaaaatctcgtcaatgtaatttctgtggtttctattcagcttgggtttcatgttttaaaataaattttaaaaagc

SEQ ID NO: 95 - DNA, 5562 bp, Homo sapiens
tttactttgtctctatgtttctgtttctttctctgtaagtaagagtggggagactagagctacctatctcaggattgtgtggagtaaatgaataatgtgtgtaaaacatttaaaatagtgtctcatgtacactaagtgcttaataaatgctaataataggaatagtaacaacagtatagttacattgttattataaatctgtatctgtggtactcttagcttaagttcgtacaaaaatattgagctgcctgttagaaatctacatttggatgcctccccagaacatcctgtgcccgacgggacaatcccagagcctcctctcgcaacagaaccatccagcgagacaaccccagaacatcctgtgcccagcgggacaatcccagagcctcctctcctaacagaaccatccaacaagagaacctcagaacatcctgtacccgacaggacaatcccaggacctcctctcccaatagagccacacgagacaaccccagaacatcctgtgcccagcgggacaatctcagagcctcctctcccatcagagccacccaacaggacaaccccagaacttgtattcaacagaacatccccagatcatcttctacccaacaagacaaccctaaaacctcttgtaccaaacgagataacctcagacccacttgtacacagcgggaccgcacacagtccttttcctttcaacgagacaaccctggaacctcctcatctcaatgctgcacccaaaaggagaatctgagaccatcatctccccaccgctccactcaatggaacaatcccaggaattcatctccccatcgtactaacaaagacatcccctgggcctcgtttcccctccggccaactcagagtgatggtccccgaacctcttccccatctcgctccaagcaaagcgaggttccctgggcatccatcgccctccggccaacccaaggtgacaggcctcagacatcctctcccagcaggccagcccagcatgacccaccccagtcctcctttggccccacccagtacaacttgccatcccgggccacctcttcctcccataacccaggccaccagagcacctcccgaacttcctcacctgtgtaccccgctgcctatggggctcccctgacctctcctgagccctcccagcctccatgtgctgtgtgcattgggcaccgggatgcccctcgagcctcttcgccccctcgctatttgcagcacgaccccttccccttcttcccagagccccgcgcccctgagagtgaaccgccccaccacgagcctccctatataccacctgctgtgtgcattggacaccgagatgccccccgggcgtcctcgcccccccgccacacccaatttgaccccttccccttcctcccagacacatcagatgccgagcatcagtgtcagtccccccaacacgagccccttcagctccctgcacctgtgtgtattgggtaccgagatgcaccccgggcctcctccccaccacgccaggccccagagccttccctcttattccaggacctccccagggccagcacagagagccttgtcccttccatggactctctgcacgagtgcccccacatccccacccctgtgtgcattgggcaccgggatgcaccctccttctcatccccaccacgccaggctcctgagccatccctcttcttccaggatccccctggaactagtatggagagcctggccccctccactgactctctgcatggctccccagtgctgatcccccaagtgtgcatcgggcaccgggatgcaccccgagcctcctccccaccccgccacccacccagtgacctagcgttcctggcaccctcaccttcaccgggcagctctgggggctcccggggctcagcgcctcccggggagaccaggcacaacttggagcgggaggagtacactgtgctggccgacctgcccccacccaggaggctggcccagagacagccagggccccaggcgcagtgcagcagcgggggccgcacccgcagccctggccgtgcagaggtggagcgcctcttcgggcaagagcgcaggaagtccgaggcagcgggggccttccaggcccaggacgagggacggtcacagcagcccagccaaggccagagccaacttctccgaagacagtccagccctgcccccagcaggcaggtgaccatgctccctgccaaacaggcagaactgacccggcggagccaagcagatccccctcatcctcggagtcctgagaagagacctgagggagatcggcagctccaggggtccccgctgccccccaggacatcagccaggacccctgagagggagctgcggacacagagacctctggagagtggccaagcaggcccaagacagcctctgggggtgtggcagagtcaggaggaaccgccagggtcccagggccctcatagacacctagaaaggagctggagcagccaggagggaggcctgggccctgggggctggtggggatgtggagagcccagcctgggggcagccaaagccccggagggagcatgggggggcacttccagggagtacaaggagagctgggggcagccagaggcctgggaggagaagcccactcatgagctccccagagaactaggaaagagaagcccactcacgagcccccctgagaactggggaggccccgcagagtcctcacaatcctggcactctgggacacccactgctgtgggctggggggcagagggagcgtgtccatacccgcgtggctctgagaggcgacccgagcttgactggagggatctgcttggccttctccgggcaccaggagagggggtctgggcccgtgtccccagcctggactgggagggcctcttggagctcctgcaggccaggctgccccgcaaggacccagctggacacagggatgacctggccagggctttagggccagagctgggtcccccaggcacaaacgatgtccctgagcaggagtcacacagccagccagaaggctgggccgaggccaccccagtcaatggacacagccccgcactgcagtcccagagcccggtccagctgcccagccctgcctgcacctccacccagtggccaaagatcaaagtgacaagaggaccagcgaccgcaactctggcaggcctggagcagacgggccccctggggagcaggagcactgcgaagggccccagcttgccagagctgcagttccaaccagaggagcctgaggagtcagaaccaagcagaggccaagaccccctgactgaccagaagcaggcagactcggcagacaagaggccagcagagggcaaggctgggagcccgctcaagggccgactggtgacctcatggcggatgcccggggaccggcccacgctgttcaatccgttcctgctgtctctgggggtcctcaggtggcgaaggcccgatctgctcaacttcaagaagggatggatgtcgatcttggacgagcctggagagcctccctccccctcgctcaccaccacctctacttcgcagtggaagaaacattggtttgtgctgacagattcaagtctcaaatattacagagactccactgctgaggaggcagatgagctggatggtgagatcgacctgcgttcctgcacggatgtcactgagtacgcggtgcagcgcaactatggcttccagatccacaccaaggatgctgtctataccttgtcggccatgacctcaggcatccggcggaactggatcgaggctctgagaaagaccgtacgtccaacttcagccccagatgtcaccaagctctcggactctaacaaggagaacgcgctgcacagctacagcacccagaagggccccctgaaggcaggggagcagcgggcgggctctgaggtcatcagccggggtggccctcggaaggcggacgggcagcgtcaggccttggactacgtggagctctcgccgctgacccaggcttccccgcagcgggcccgcaccccagcccgcactcctgaccgcctggccaagcaggaggagctggagcgggacctggcccagcgctccgaggagcggcgcaagtggtttgaggccacagacagcaggaccccagaggtgcctgctggtgaggggccgcgccggggcctgggtgcccccctgactgaggaccagcaaaaccggcttagtgaggagatcgagaagaagtggcaggagctggagaagctgcccctgcgggagaataagcgggtgcccctcactgccctgctcaaccaaagccgcggagagcgccgagggcccccaagtgacggccacgaggcactggagaaggaggttcaggctcttcgggcccagctggaggcgtggcgtctccaaggggaggctcctcagagtgcactgagatcccaggaggatggccacatccccccgggctacatctcacaggaggcatgtgagcgcagcctggcagagatggagtcctcgcaccagcaggtgatggaggagctgcagcggcaccacgagcgggagctgcagcgcctgcagcaggagaaggagtggctcctggctgaggagacggcagccacggcctcagccattgaagccatgaagaaggcctatcaggaagagctgagccgagagctgagcaaaacacggagtctccagcagggcccggatggcctccggaagcagcaccagtcagatgtggaggcactgaagcgagagctgcaggtgctatcggagcagtactcgcagaagtgcctggagattggggcactcatgcggcaggctgaggagcgcgagcacacgctgcgccgctgccagcaggagggccaggagctgctgcgccacaaccaggagctgcatggccgcctgtcagaggagatagaccagctgcgcggcttcattgcctcgcagggcatgggcaatggctgcgggcgcagcaacgagcggagttcctgcgagctagaggtgctgcttcgcgtaaaagaaaacgaactccagtacctaaagaaggaggtgcagtgcctccgggacgagctccagatgatgcagaaggacaagcgcttcacctcgggaaagtaccaggacgtctatgtggagctgagccacatcaagacacggtctgagcgggagatcgagcagctgaaggagcacctgcgtcttgccatggccgccctccaggagaaggagtcgatgcgcaacagcctggctgagtagaggtcccgcccagctgcagaccctccaggctggaggaccagccgccctccttccctcctggatggaagtaaaaagccaagctttctccccaccctctgtgggccacacgtgcacttgcacccaccacacacacacacacacacacacacacacagacacacagacacatacgcacacacgtgcacacatgtacacacggatacacacacacacacacacacacacactgcatatctgagcgcgcccctcgcactgggtctcaccttgcaccttcttcaggattttatatgtgaagagatttttatatagatttttttcctttttttccaaaacactttatacttt

SEQ ID NO: 96 - DNA, 4978 bp, Homo sapiens
agacgatgtcgctctcagacaagcagacagcctctctcactgccgcgtacggtcagctcagtaagggcaagcctgcagagtgccgaatggactccccaaaagaaatcagtcaagccggattcgaatggcagaggacagagggcaaactgaatgaaattgggctgaatgtcagcatggacgggcaaccaaaagatgggcttgtgaagaatgccagcttcctggagcagaacaagctctgcttttttgaggggaagctagacaaagagctgagcattgaaatgcaggacaaggactgtcaagaagcctcaggtcaccttgagagcaggtatgtgatttcagagacctgccatcccttggaggggaactcggtacaccagaagacctccgagttccatctgggactcatagaggggccagacaaaaacaaaaccattccagttcaggggaaggtggcagggaagaatggactagagaccaagagccagtcagatctggatttccctggggctgctgacatccctaccagatatgttaaggagcaggaaaccagtgtttggaaccccagctttcatccagtggctcaaggctctctgggctcaagggaagcaactccgggagagatggagaatagcatcacccctggctgcccagtgattggggtggtaaatgataactctgagcagctgaagtgtgagtccccactcctggtgtctctagcccacccagcccccattattgagcattcacccaccaccattccgccaatcactatggtgttcacccaggaacatttgaatgcaagctgtcacatcagagaccatgataaggagttggagaaattgagttctaccgaggaggctgtgctcaaccaagccccccagcagaaaaaggcagtgcgcagggccctgtctgaatgttctcacctctcagttcccccagctgtcaaccttgcagataagtaccctgaactccctgcccgagaagagccttcttctggcctgctgcctccccctagtagcccaatgcctagtcctacacctgggaaactgggagctcctgctatgaagcgctccatgactgtgggtgaggaacagacagctagctacaaattgagccctgggaaactgcccatcttgtctactaaagagatacctcctttcatctgtgaggaaccagtggccaagaagagagaagaattggctcacttcagcaacagcagcagcaactctgggaagaaggaactcggcactgctggattatatctccatagtaagctggagcagattcctgaaggaagcagcaaggaaaaagggcaggaagattttagtgaaactagaattgattcatgctcgcaggtttgccagcgaggagagaaacagccaggacagacggctctggcagggaagaaagaaattgaggtcactgcaacccagagcactccatcgttcctgtttgaaaagcccccacgtgatggaatagccaggccagaagaaggaaggcctgtggtgagtgggacaggaaatgacatcaccaccccaccgaacaaggagctcccaccaagcccagagaagaaaacaaagcctttggccaccactcaacctgcaaagacttcaacatcgaaagccaaaacacagcccacttctctccctaagcagccagctcccaccaccattggtgggttgaataaaaaacccatgagccttgcttcaggcttagtgccagctgccccacccaaacgccctgccgtcgcctctgccaggccttccatcttaccttcaaaagacgtgaagccaaagcccattgcagatgcaaaggctcctgagaagcgggcctcaccatccaagccagcttctgccccagcctccagatctgggtccaagagcactcagactgttgcaaaaaccacaacagctgctgctgttgcctcaactggcccaagcagtaggagcccctccacgctcctgcccaagaagcccactgccattaagactgagggaaaacctgcagaagtcaagaagatgactgcaaagtctgtaccagctgacttgagtcgcccaaagagcacctccaccagttccatgaagaaaaccaccactctcagtgggacagcccccgctgcaggggtggttcccagccgagtcaaggccacacccatgccctcccggccctccacaactcctttcatagacaagaagcccacctcggccaaacccagctccaccaccccccggctcagccgcctggccaccaatacttctgctcctgatctgaagaatgtccgctccaaggttggctccacggaaaacatcaagcatcagcctggaggaggccgggccaaagtagagaaaaaaacagaggcagctgctacaacccgaaagcctgaatctaatgcagtcactaaaacagccggcccaattgcaagtgcacagaaacaacctgcggggaaagtccagatagtctccaaaaaagtgagctacagccatattcagtccaagtgtggttccaaggacaatattaagcatgtccctggaggtggtaatgttcagattcagaacaagaaagtggacatctctaaggtctcctccaagtgtgggtctaaggctaacatcaagcacaagcctggtggaggagatgtcaagattgaaagtcagaagttgaacttcaaggagaaggcccaggccaaggtgggatccctcgataatgtgggccacctacctgcaggaggtgctgtgaagattgagacctacaggctgacgttccgggcaaatgccagggcccgcaccgaccacggggccgacattgtctcccgccccccacacttccctggcggccccaactcgggctcccgggtccttggccccctttcccgggctgtccactagaccagtgagcgcttgggcgccgtgctgggcagcccgctaggctcgccttccctcctgctttgcgtgcccggggcagcagcagccctgccccacacctcctctcactccccagcctgggcccatctccctgctttggtcttgccccatcactgcgccactgctccgtggaggaggttgggagggggttggggtggttgaggctaagttgggatctaggagaggagaaccagattctatcctcatctttttttggttctttggtccaaacccaaaagaaactgacatgccctcccttctccctggatctacctggagggaagagtggaggtggattccgagtggtgacaggacgctgaccgtggagcttaagccactgcctctccctctggtcccacaaatgggcgcccccccctccccatgcaggtggtgtcgggcccttcttgctgccctgccccaagttgggggtcagtgctgcctgtccccatgcttaacatacccgcctagctgctgtcacatttttcttgttttgtccttttatttttttctaataacctaaaaactggcaaaatagttctgcaggttgaagccatgtctacatgaaagtcctcagtaagtgttagagggaacagggcggagatatccttatgccacccccgctggaggatgtgggcagcttagggccctggaggcggtgcggcagggaagaggggtgcagaggctgtggctggtgagccggtcaggcacacaaggggcccttggagcgtggactggttggttttgccattttgttgtgtgtatgctgcttttcttttctaaccaagaggctggttttggcatctctgtcccattccctgggatctggtggtcagccctaggataaaaagccagggctggagaacaagaaagggccaggagatggaattccttcaggccggcacccacaccctaggacatgtaagccctcatgtccaagggagcctcatgcagatagtaggaaatcaggtctggaaatttaaaaataaaaggcatgagactaaggctatctgcttcccttatgccctgactggagaggggagggaggagaggcaaggcccacagagggcatcccagctaggccttgggatggctgcagtgaggagaaatcccgggaactgtattgacacaaagattcttattgcacttgtattttttgtattaaagtttgcatggtttctaataaaggattcaaacataagtttgtagtgaaatggcctgggagattccaagggcttctctggagggggattggctgcagtgtagatttgcctctgaggaggctgccccagacttggcctcctcatgccccctcctgacctctgcccttctctggtcctggcatccctggagaaggtaggggtcttgacctaagtttagatttgatctccatgtgcagggaggctgtcctgggcctgacaggtcctccccctttctgaggtagcagtgccttgtggaggtttgacaccatgtccctagctccccaagcacacaccaggaaactgcaggggctcacggaggaagtgctgcctgggccagggggaccagctttcctccgtagagaccatgtgcagaacacttctgctgtgccaagaacatgagggagccagtgttttgtcagcaggaagaaagggcctgctgggatgaaagtgggaaggaaacagggttgggtagtcaggagacacctcaggggcaacagcacaggcccagagtacctgctgcctccactgcgtctgtcctggggtcatgaggatgctgaggttgacgacaggttccaggtcctttcactcctttggccaaaggttgggggtaggtggcccaagtggcgtgctctctaggtagacaacaggagtggtcagagttccctcaaagaaggatcctccactccagagcacctgagaaggccgggaccagaggccctgtgtgatgtgtactccgcagctgtttggggtgggacatttctgtacttctcgatttgcttatggctcagccattacctgtgtcagtccatgattctgttgtaacagttttaagagtaaataaataaagctgcctgatgtccc

SEQ ID NO: 97 - DNA, 4184 bp, Homo sapiens
tcccgcgggctctcgtcgctgttcacggttgtcccctgcctgtcgtgccacacggcggcgccgggcatgagcgcttccacgtccggctccgggccggagcccaagccccagccccagcccgtgcccgaaccggagcggggaccgctgtcagaacaggtgtcggaggcagtttcggaggcagtgccaagatcggaacctgtgtccgagacgacgtctgagccggagccaggggctgggcagccatcggaactgctgcaggggtcgcggccggggtcagagtcaagctcaggtgtaggggctgggcccttcactaaggccgcatcggagccgctctcccgggcggtggggagcgcgacctttctcagacccgagtcaggatcgctgccagcgttaaagcccctgcctcttctgcgaccaggacaggcgaagactcctcttggggttccaatgtcggggactggcacgacctccagtgccccactggccttactgcctctggacagcttcgagggctggcttctcaagtggaccaactatctgaagggctaccagcgccgctggttcgtgctgggcaatggtttgctctcttactacagaaatcagggtgaaatggcccacacgtgccgtggaaccatcaacctgtccaccgcgcacattgacacggaggactcttgtggtatcttgctgaccagtggggccaggagctaccacctcaaggccagctcagaggtggaccggcagcagtggatcaccgccctggagctggccaaggccaaggctgtccgcgtgatgaacactcattcagatgactctggggacgacgacgaggctaccaccccagccgacaagagcgagctgcaccacaccctgaagaatctttccctgaagttagatgacctcagcacgtgcaatgacctcatcgccaagcacggcgccgcactccagcgctccctgacagagctggacggcctcaagatcccatctgagagtggggagaagctgaaggtggtgaatgagcgggccaccctcttccgcatcacatccaatgctatgatcaacgcctgcagggacttcttggaactagcagagatacacagtcggaaatggcagcgggcactgcagtatgagcaggagcagcgcgtgcacttggaggaaaccattgagcagctggcgaagcagcacaacagcctcgagcgggccttccacagtgcccctggccggccggccaacccctccaagagcttcattgagggaagcctcttgactcccaaaggagaggacagtgaggaagatgaagataccgagtactttgatgccatggaagactccacatccttcatcaccgtgatcaccgaggccaaggaagacagcagaaaagctgaaggtagcaccgggacaagttccgtggactggagctcagcagacaatgtactagatggtgcctcgctcgtgcccaagggttcatccaaagtcaagaggcgagtccgcattcccaacaagcccaactacagccttaacctctggagcatcatgaagaactgcatcggccgggagctctccaggatccccatgccggtgaacttcaatgagcccctgtccatgctccagcggctgacagaggacctggagtaccaccacctgctggacaaggcagtgcactgcaccagctcagtggagcagatgtgcctggtggccgccttctctgtgtcctcctactccaccacagtgcaccgcatcgccaagcccttcaaccccatgctgggggagaccttcgagctggaccgcctcgacgacatgggcctgcgctccctctgtgagcaggtgagccaccaccccccctcagctgcgcactacgtgttctccaagcatggctggagcctctggcaggagatcaccatctccagcaagttccggggaaaatacatctccatcatgccgctaggtgccatccacttagaattccaggccagtgggaatcactacgtgtggaggaagagcacctcaactgttcacaacatcatcgtgggcaagctctggatcgaccagtcaggggacatcgagattgtgaaccataagaccaatgaccggtgccagctgaagttcctgccctacagctacttctccaaagaggcagcccggaaggtgacaggagtggtgagtgacagccagggcaaggcccattacgtgctgtccggctcgtgggatgaacaaatggagtgctccaaggtcatgcatagcagtcccagcagccccagctctgacgggaagcagaagacagtgtaccagaccctgtcagccaagctgctgtggaagaagtacccgctgccggagaacgcggagaacatgtactacttctcagagctggccctgaccctcaacgagcacgaggagggcgtagcgccaaccgacagccgcctgcggcccgaccagcggctgatggagaagggccgttgggacgaggccaataccgagaagcagcggctggaggagaagcagcgcctgtcgcggcgccggcggctggaggcctgcgggccgggcagcagctgcagctcggaggaagagaaggaggcggatgcctacacgccactgtggtttgagaagaggctggatccgctgaccggggagatggcctgtgtgtacaagggcggctactgggaggccaaggagaagcaagactggcatatgtgccccaacatcttctgagcgccacccttgcaacaaatacaggcgcctgcacagcctggcccacctgttcattaatgcactcaatttagtactgaatggtctttctcccagcccattcccagcccttcctatttcctttcctattttttttttctccccacactttcttgggactcccaccttggaaggaggaagggctgacctgggttctctccagcccccaggtgcgccgggtcacccgtgccccttcattatggacctgggccctaccggaacccctgccccagttaccacaactcaggccggctggcccgggccatgggctgcgcaaatcaccagcccccaacccagggaggaactggcccctcctagggagcctcttcgacttttttagaaaaatgatctccatttctttccagccatgatgtttagtaaatatttttagtaccgcacttagcagacagctttccaagtgtgctttcttgccacaaaagtgtcctggcaagagccccttatttttaagacatcaggaagccagaccgctttgagttgggagaattttgtagctcaacatatcaagtcctcgatggtatctgagctgcccacacccccacctgccaaggccccacagagcccaaaacagaagggggctgccccagcccagcagagcacagagtttctggagctcccatccacagatgcaggagggggtactgatggtaacccccatgtggatttgagggcagcagtccctggcctcaccctagccagcctgggtggctccctagccccaagaggccaggaagggctggaaggcagggcctgcaggtgctccccgccctgagacccaggccccaaatcagcaataatgaacaaacccttggcccagcctgggctggtgacctgggcaccagagaccttgcatccctcctcatcctaggaggcccctaggggtgccccatctcagtgtcccctgaactctttatttgcctaatttatatatatatatatgagatatataaatatatataaaatagctattttgcttaaatttctacagtatgtaaaagtgaaaaaatgatgaagacgggtgcacctgtctgagtttggccctcatgtgagctgtgcccttccctctcctcatgcccccttccagcggcttctgccaaccatggggggctggaccaccatggccactgacccagcccctcagaatcccacactccaatcctttccatttcagtttagtcctaaaagttcatcacagggtctttctttctactccaggactggttttgtttttatatatataaaaaaaaaaagtgaaaacaccaatgtgtgaaatgccttacaatgcccactggagaggcggggcggggtggggcaggatggccccactggggctcctacagagctgtggaatgtacctctccccaacactgttttgttagcgagcaccttttgaccagtaataaaaaaccttggctttggagttttcc

SEQ ID NO: 98 - DNA, 4139 bp, Homo sapiens
attggaggctattactggcatcctttatcagaggttcacatatgggatcctttgacaaatgtttggattcagggagcagaaataccagattataccagggagagctatggtgttacatgtttaggacccaacatttatgtaactgggggctacaggacggataacatagaagctcttgacacagtgtggatctataacagtgaaagtgatgaatggacagaaggtttgccaatgctcaatgccaggtattaccactgtgcagtcaccttgggtggctgtgtctatgctttaggtggttacagaaaaggggctccagcagaagaggctgagttctatgatcctttaaaagagaagtggattcctattgcaaacatgattaaaggtgtgggaaatgctactgcctgtgtcttacatgatgttatctacgtcattggtggccactgtggctacagaggaagctgcacctatgacaaagttcagagctacaattccgatatcaacgaatggagcctcatcacctccagtccacatccagaatatggattgtgctcagttccgtttgaaaataagctctatctagtcggtggacaaactacaatcacagaatgctatgaccctgaacaaaatgaatggagagagatagctcccatgatggaaaggaggatggagtgcggtgccgtcatcatgaatggatgtatttatgtcactggaggatactcctactcaaagggaacgtatcttcagagcattgagaaatatgatccagatcttaataagtgggaaatagtgggtaatcttcccagtgccatgcggtctcatgggtgtgtttgtgtgtataatgtctaattgaatctgcagaaatgaccaagcaatcacttttttggagtatagttttataaaaaaaagaatgcagggtttgaagttccttacctgataattgtgtctggcacatgataggggatcagtaaattgtaattcctaaccctactgtactcccaaacatggtgattcatggtcaagaaaaatcttatatatatatatatatgtatacacatatatatgtgttcatatgtatgcgttcatacatacgcgcgtatgtatacatatatgtgtatacatacgtgtgtatgtatacatatatgtgtatacatacgtgtgtatgtatacatatatgtgtatacatatatatgtgtgtatatatatacacatatatacgtatatatgtatatatatatacacagttgaatcagtgggattaatacctataatctctggttttcaaaggtaatatggaatatttgacacttggtaaaaggtgaactacctttgtagtgaatcttttcctcttggtagcatcaacactggggataaatcagaaccattctgtggaatgaaatgtttctcaagagcctataatatagtagatagtgcatattaagatgtctggctgggcatggtggctcatgcctgtaatcccagcactttgggaggctgaggcgggaggatcacttgagcctagaagttggagactaacctggcgagaccctgtctcaaaaaaaaaaaaaaaatcaatttagctagcaggaatttgacatttaaagagggaatcttctctacctctacaaaatcaacacttaacacttttttcaccttcagaattatttagaatgtggatttactttgtctagttttttcctttatagtgtaatttattgttactctctatttactgactaccagagatatacaaaatactgtgcaaaagattgttactgttcaaagagcttacaaactaaatttaaaagaatagcaagtctgaaaaatagaagatagtcaaatatttgtttatgccaagaactgtttttaattttcagctttgatgtaaattgctagcttaggtgtctttagttcaagcatgttaggaaatcctctttattcttaaatatagatacatgtctgcatatatgattgaattttagagccagaaagcatgtagagcagttgtgattagtagaaaatacactgacaagaagatatttgcatttatttcccaaagctgccagtaactagattttgtgacttaagtcatttaacctctccttgattagagcttcctgagccatgcacactggcactgcaaatcacagacaggcctagatacagatcccctcaccccttgctacatccaaaggtggcctgggtggctggagcctctgggccagaaccacctttgtccattttcctcagtgtgcctacagcatcgctttccatgtgtgccataacttgggaatagttgggatgtgttgcttaactcctttgcaccattagttatctgtgagaccatctattccacactcttcattttttaaaaagagacaataattatttttaactcactgaagtttaaaactacctagcatttctgattaaaaaaaatttagaaggaaaattttaatgcatttatttcagatggcgttttaaatagatacaaccctttggaaacacaatatggtactacatagcaagggctgtaaaaatgaccatatcctttgccccataaattctacttctatacttttaaccttaaaaataattcagaaaaaagataaatgcatgaagacatttatgtctgcattctttataataacaaaaattggggaaaaaaactccatgtcaagaaagtgggataagaaaaatagtgaagtattatactgccattaaaataattatttggaagactgtagaaacgtggacatgtttgatatggtaagtaaaatgagcacaatacaaaatagtatgcatactatgattgtgactttgtaaaatctttatgcatgtggaaggtaatctgcaaaacaaattcattgtgttagtgtagcgggatatggaatgactttatttatttaaatcttttctttaatattactttgtattttcaataaaaataaatcactgtacatagtaagactgcttgaatttgggctgattgggttgcaggatagtctgaattaatgaaaacaagtgagttatacactacttcaatctgtaattgaattgtagactattttattgctctgaagaacatttagcaattaatgctagaactaatatgctgctcagtagtgctttagagatccactttatggcataggtgagaacaattgcagtcaccttcccctcctttgccagtttatgtaggtcctatgaactcctgagtcaagtctggccttctctggaaagtctttcctgtttcagccacagtaagactcccattgtcacatttaagaattggtcatttatatatgaattgtgtatctcttggctaagttagagattatggaccgcatcttattcttggccttctcaagatctagtatttcatatgtacgtccagcatacaaggacgatgatatggattatttttacagaaaagcatgctggaggtgcttgaaggatcttgaaaatagtttgtgatctgaggtatttaattttcagctcctattttctgtttgttttttgaatttttatttttatttttatttttttatttttagtagagagagggtttcaccatgttggccaggcaggtcttgaactcttgacctcaggtgatccgcccatcttggcgtcccaaagtgctgggattacaggcataagccactgcacctggcctctttttgaatttttaaaatgctgtactttgtgtcaaaagctcctgttttctgttagaaaacatttttgctatggatttgtgcacagcaaaaaggattacaaaggtgtacaggtttgtcaactttttcaaatttgaagtcactgcggtatgatgaaaaatattttactaaggccaaacattttagtaatcccagcctgtaatcccacgcctgtaatcccagtactttgggaggctggggtgggagaattgcttgaggccaggagttcgagaccagtctgggaaacatggggagaccttatctgtacaaaaaataaaaaaaattagcccagcatggtgcatgcctgtagttccagctacttgggagactgagtagggaggatcccttgagcccaggagtttcaggttgcagagagccatgatcacactgtactccatcctgagcaacggagtgagaccttgtctctac

SEQ ID NO: 99 - DNA, 3934 bp, Homo sapiens
gatggagctggtggctggtctccacttgtgtctaacaaataccagtggttgcagattgaccttggagagagaatggaggtcaccgctgtggccactcaagggggatatggtagctccaactgggtgaccagctacctcctgatgttcagtgatagtggctggaactggaaacaatatcgccaagaggacagcatctggggtttttcaggaaatgcaaatgcagacagtgttgtgtactatagactccagccttctatcaaagccagatttctgcgcttcatccctttggaatggaaccccaagggcagaattggaatgcgaatcgaagtgttcggatgtgcatacagatcagaagtggttgatcttgatggaaaaagttcccttctctacagatttgatcaaaaatccctgagcccaataaaagacattatttctttgaaattcaaaaccatgcagagtgatgggattctactccacagggaagggccaaatggagatcacatcacactgcaattaagaagagcaagactctttttacttattaattcaggtgaagctaaactgccttccacttccaccctggtcaatctcaccctgggcagcctgctagatgatcagcattggcattcagtgctcatccagcgtttgggcaaacaagtcaacttcacagtggacgaacacaggcatcatttccatgcacggggagaattcaatctcatgaatcttgattatgagatcagctttggagggattccagcacctggaaaatcagtgtcattcccacatagaaattttcatggatgtttagaaaatctctattataatggagtggatatcattgatttggccaagcagcaaaaaccacagatcattgctatgggaaatgtgtcattttcttgttcacaaccacaatctatgcccgtgacttttctgagctccaggagttatttagcactgccagacttctctggagaggaggaggtttctgccacttttcaatttcgaacttggaataaggcagggcttctgctgttcagtgaacttcagctgatttcagggggtatcctcctctttctgagtgatggaaaacttaagtcgaatctctaccagccaggaaaattacccagtgacatcacagcaggtgtcgaattaaatgatgggcagtggcattctgtctctttatctgctaaaaagaatcacttgagtgtggcggtggacggccagatggcttctgctgctcctctgctggggcctgagcagatttattcgggtggcacctattattttggaggttgtcctgacaaaagctttggatccaaatgtaaaagtccacttggtggatttcagggatgtatgaggctcatttctatcagcggcaaagtggtagatctgatttcagttcagcaggggtcccttgggaacttcagtgaccttcagatagactcatgtggcatctcagacagactagtgatggtctcctctctttctccccccatttctgcatacaagaaactgcatggaccatcatacagcacaacggctctgacttaacaagagtcagaaatactaatccagagaacccatatgctgggtttttcgagtatgtggccagcatggagcaacttcaggccactattaaccgtgcagagcactgtgaacaggagtttacttattactgcaagaagtcacggctggtcaataagcaagatggaacccctctgagttggtgggtaggaagaaccaatgaaacgcaaacctactggggaggttcttcgcctgatcttcaaaaatgtacttgtggattagagggaaactgcattgattctcagtattactgcaattgtgatgctgaccggaatgaatggaccaatgacactggattgcttgcttataaagaacatcttccagtaactaagatcgtgattacagacacaggccgactgcattcagaagcagcttataaactggggcctctgctctgccggggagacagatcattttggaattcagcttcctttgataccgaggcttcatatcttcattttcctaccttccacggagaacttagcgcggatgtatctttcttttttaagacaacagcttcatctggggtatttttagagaacttggggattgctgattttatacggatagagcttcgctctccgacagtagtgactttttcatttgatgtggggaatgggccttttgaaatctcagtgcagtcacccacccacttcaacgacaaccagtggcaccatgtgagggttgaaaggaacatgaaggaggcctcccttcaagtggatcagctgacaccaaagacacagcccgcccccgctgatgggcatgtcctgttacagctcaacagtcagctcttcgtgggtggaacggccaccagacagagaggctttctgggctgcattcggtctctgcagttgaatgggatgaccctggatttggaagaaagagcccaggtgactccagaagtgcagccaggttgtaggggacattgcagcagctatgggaagttatgccgcaatggagggaaatgcagagaaagacccattgggttcttttgtgactgcactttctctgcatacacagggccattctgctcaaatgagatttctgcatattttggatctggctcatccgtgatatacaattttcaagaaaattatcttttaagtaaaaactccagctcccacgctgcttcatttcatggtgatatgaagctgagcagagaaatgatcaaatttagtttccgaacaacacgaacaccaagcttgctgctttttgtgagctccttttacaaagaatacctttctgtgatcattgccaaaaatggaagtttgcagatcaggtacaagttaaataaatatcaagagcctgatgttgttaactttgattttaaaaacatggctgatggacaacttcaccacataatgattaacagagaagaaggagtggtctttatagagattgacgataatagaaggagacaagttcacctgtcatcaggcacagaattcagtgcagtcaaatctctggtattgggcaggattttagaacacagtgatgtggaccaggagactgcactggcaggtgcgcagggcttcacaggctgcctctctgcagtgcagctcagccacgtggcccctctgaaggcagctctgcaccccagccacccagaccctgtcactgttacaggacacgtgaccgagtccagctgtatggcccagcctggcactgatgccacatcaagggaaaggacacactcgtttgcagatcattctggaacaatagatgacagagagccccttgctaatgcaatcaaaagtgactctgcagtaattggaggtctgatagctgttgtgatttttatcttgctttgcatcactgccatagctgttcgcatttatcagcagaaaaggttatataaaagaagtgaggcaaaaaggtcagagaatgtagacagtgctgaggctgttctgaaaagtgagcttaatatacaaaatgcagtcaatgaaaatcagaaagagtacttcttctgattggcagctatgatttaacataaaattatgatagtttgttttaatagccaggggttctcaatggaaaaacgaatgctcttacactgaatgtacaggcagtgggcttgcagcactgccatcttgccatgtacaggcttggggtggctccaggaagcctcgtccagtgatatatttctcatagcattcattctatggaacaagaaattagatattgctgttaattttcaactgttctggtatgatctaaaacaagtttaacctgcttaatggctacagtttttacatgtgaaaactgtagccttggtctcttaaccatgtaatacataagttttgttagaggtaaaaattaaatttggactataatgtccttgctttatttg

SEQ ID NO: 100 - DNA, 4729 bp, Homo sapiens
gaggagaggccggacggcgcgggcgccggcgaggagagcccgcggctgcagggctgtgactccctgacgcagatccagtgcggccagctgcagagccgcagggcccagattcaccagcagattgacaaggagctgcagatgcggacgggcgctgagaacctctacagagccaccagcaacaaccgggtgagagagacggtcgccctggagctgagctacgtcaactccaacctgcagctgctgaaggaggagctggaggagctcagcggtggcgtggaccctggccggcatgggagcgaagctgtcactgtccccatgatccccctgggcctgaaggagaccaaggagctggactggtctacaccgctgaaggagctgatctcagtgcactttggagaggacggcgcctcctacgaggcagaaatcagggagctggaggccctgcggcaggtgtgtggttcccccgcccacccaccctcctgcagccctgggagacacatgcagaggctgaagctgaagtcaggaacagacagaggagctcagcgtagacatctcgaggacgtggggagacgggcgcaccaggggccctgtgtgtccagacccagccagggggcgtggaggggctcccaggtggctccggtgccgcatgctgctggccttcgggagtcacggctgcccagggccccactggctttgcctccccgccccccatggtgctggtgcccatgggacttcccagggcagtgtgtgtgagtggggtgggccagggcggtggggcccagtggctcctgccctgcaggccatgcggacccccagccggaatgagtcgggcctggagctgctcacagcctattacaaccagctgtgcttcctggatgcgcgcttcctcacccctgccaggagcctcgggctcttcttccactggtacgactcgcttactggggtcccggcccagcagcgtgccctggccttcgagaagggcagcgttctcttcaacatcggtgccctccacacgcagattggggcgcgccaggaccgctcctgcaccgagggtgcccgccgcgctatggaggccttccagagggccgctggggccttcagcctcctgagggagaacttctcccatgcgccgagcccagacatgagcgctgcgtccctctgcgcactggagcagctcatgatggcccaggcccaggaatgtgtgtttgagggcctctcaccacctgcctccatggccccccaagactgcctggcccagctgcgcctggcgcaggaggccgcccaggtgagctcgggcacccgtgtcaggatgcagggggtggggccgagctggggtcagagcccaggtccaggcatgcgtgagctctcccacctccttccttgtgtgtcagccccgagccagctgttgtcctgctccctgggggggctggtcaggaacctggggacccgagcctctgcctccaggggatggcacaaagcagcaggaactgaggtgccagggaggctgctgggatggtggtcggagcaggtggaggctgggtagggagaagcaggcaccacctggagagtgggaggccctcgcgtgcctgccacatccaccggcaggtggcagccgagtacaggctagtgcaccggaccatggcccagccacccgtccacgactacgtgcctgtctcctggactgccctggtgcatgtcaaggccgagtacttccgctccctggcccactaccacgtagccatggccctctgcgacggctcccgtgagtgcccaccgcacttgcccatggtactgccaaggcccccccgcgcagggctcacagcctctctgtcccccagcagcgaccgagggagagctccccacgcacgagcaggtcttcctgcagccccccacctcctctaagccccgaggccctgtgctgccgcaggagctggaggagcgcaggcagcttggtaaggcgcccatgggtggagtgccctggggctcagatggtcaccaacggtggcagggtgtcccccaccaccctcatgctgtttgccacctgctgtccccgtgctgacgagttgggccacctacctatccctggatggcctgtgcctgatgggtgacggcccagcgcaggggccccaggagtgctgggcagcctctgagcaggtgggagaccactgggagcagctcatccctggcccctgctttgcacgtggcagagccctcctgcacagccagctcctcacccccgtggcgcgcacccccaacgaaagtggctgtgatgagccccacagccctggcgttgcccactccttctgccacgtcccagggcccacgggcccacatggtgtgtgacatcccagtgccccgcgtgcaggcaaggcacacctgaagcgtgccatcctggggcaggaggaggcgctgcggctgcacgccctgtgccgcgtcctgcgcgaggtggacctgcttcgggctgtgatctcccagacgctgcagcgctcactggccaagtatgcggagctcgaccgtgaggatgacttctgtgaggctgccgaggccccggacatccagcctaagacccaccagaagccagaggccaggatgccacgcctgtcccaggggaaggggcctgacatcttccatcggctggggcccctgtctgtgttctcagccaagaaccggtggcggctggtggggcccgtccacctgacccgaggagagggcggctttggcctcacgcttcggggagactcgcctgtcctcatcgctgccgtcattccagggagccaggccgcggcggctggcctgaaggagggcgactacattgtgtcagtgaatgggcagccatgcaggtggtggagacacgcggaggtggtgacggagctgaaggctgcgggagaggcgggcgccagcctgcaggtggtgtcgctgctgcccagctctagactgcccagcttgggggaccgccggcccgtcctgctgggccccagggggcttctaaggagccagagggagcatggttgcaagaccccggcatccacgtgggccagtccccggcccctcctcaactggagccgaaaggcccagcagggcaagactggaggctgcccccagccctgtgccccagtgaagccagctccgccctcatccttgaagcacccagggtggccgtgagggccaggatccctgcacgcctcagccctggctccagctggcagcaagcaccgagcatgccctccccacccagaggacctccgggcaatgcctgtcccgcctcatgctggaggctgcctcgggcacctgcctgcccattaaagactggtcagacctgtctgagcccagtgatgggagctgtggcctcttcacccacacacagaaggatgccagtccctctgtcggtctgaggtcagcttcctggggctgccccaccctgagggctccttacagggtgctcctcacagccatcccatctgtacccccgggctctgtccaccctgctgctgccctgggcacagaccctgaggtctcagtcctgcctccagccaagtttctgcctggtgcccagtgattcctgctgggcaccccttcgctcactgcccctccaccatgcagcagccagacacacccacagcacccgcagacctctaggccgggtcccagacatggccttcccccaaaatacttcctgctgtcctgtctgtgcacagagcaagggactccccacctctgcgccctgtcctggtcatcatgggctctgtgctggtcaacccagcaagtgtcccgtttgcccaggagtccctggtgtcgtggcccaggtctcatggtggccctaagcctgccagccctgctgcccgccttgctgtcctgctctgagcatgggtgccaccctccagctcctgggcgtgtcacttctctctgagcctggggcctgcatgggcccccagccctccccagcctgcttgggccactcctgctggcctccacaggccgtgagctgtcagtgtctcaagcaggggaagtgagggctgcctccaggcctccgtgtactgggtggacaatggcccccaaaggccgtcggcaagaacaccacctccaggacccctacagcagtgggctcaggacttgggcaccaagaggagagggtgggaagggctgcagagtcagggctgcacccaagaggagccacggagccggagccggagcggaggcccccaccgagggccccagggcctggcaggttccggaagagacagggccagcgggagtcattccctgcagccactagggggcagccgccacccgctcagcagccctgggaggcggcacgggcaggtgcgccttgggagggctgaggcaaagaccccgggtagaaaggcggcccccagctctgcgagacccctgccctcttgtccagtcccttccgagggtccgcaggtgagagcagcctgccctgcatcccaggctctggttccagggtccagggccctgcgctgccacctccctcgtgcttcagccaagaaaatgggggtgcaagtagggtgtttggggtcccagagacgcaggcgccgcggcgcgatcttcctgggcaggagggcagggctccccaacctgcctgagccggggtgggggtccaggtcccccacttgcccttgtgggaaaatccctgtctcagcagaatgggccaaggtcatgcaggtctccccagcacgtgttaatttggttaataaaactgtggatcaag

SEQ ID NO: 101 - DNA, 4525 bp, Homo sapiens
ggaggccaagaggaagctgcggatcttgcagcgcgagttgcagaacgtgcaggtgaaccagaaagtgggcatgtttgaggcgcacatccaggcacagagctccgccattcaagcgccccgcagcccgcgtttgggcagggctcactcgccctccccgtgccccttccgcagcagcagtcagccccctggaagggtcctggttcagggcgcccggagcgaggaacggaggacaaagtcctggggggagcaatgtccagagacttcaggaaccgactccgggaggaaaggagggcccagcctatgctcctcgcaggtgaagaaaggaatgccacctcttcccggccgggctgcccctacaggatcagaggctcagggtccatccgcttttgtaaggatggagaagggtatccctgccagtccccgctgtggctcacccacagctatggaaattgacaaaaggggctctcctaccccgggaactcggagctgcctagctccctcattggggctgttcggagctagcttaacgatggccacggaagtggcagcgagagttacatccactgggccacaccgtccacaggatcttgccctcactgagccgtctgggagagcccgtgagcttgaggacctgcagcccccagaggccctggtggagaggcaggggcagtttctgggcagtgagacaagcccagccccagaaaggggcgggccccgcgatggagaaccccctgggaagatggggaaaggatatctgccctgtggcatgccgggctctggggagcctgaagtgggcaaaaggccagaggagacgactgtgagcgtgcaaagcgcagagtcctctgatgccctgagctggtccaggctgcccagggccctggcctccgtaggccctgaggaggcccgaagtggggcccccgtgggcggggggcgttggcagctctccgacagagtggagggagggtccccaacgctgggcttgcttgggggcagcccctcagcacagccggggaccgggaatgtggaggcgggaattccttctggcagaatgctggagcctttgccctgttgggacgctgcgaaagatctgaaagaacctcagtgccctcctggggacagggtgggtgtgcagcctgggaactccagggtttggcagggcaccatggagaaagccggtttggcttggacgcgtggcacaggggtgcaatcagaggggacttgggaaagccagcggcaggacagtgatgccctcccaagtccggagctgctaccccaagatcaggacaagcctttcctgaggaaggcctgcagccccagcaacatacctgctgtcatcattacagacatgggcacccaggaggatggggccttggaggagacgcagggaagccctcggggcaacctgcccctgaggaaactgtcctcttcctcggcctcctccacgggcttctcctcatcctacgaagactcagaggaggacatctccagtgaccctgagcgcaccctggaccccaactcagccttcctgcataccctggaccagcagaaacctagagtggtaagtcttgctctgagatttgcccagaactcatgctgatttcagcagacttttgatgccctatgcatccctttttcttaactttctacacagtcatgaaaactcagaccagggccctgggacagtcacagtgaataattctgtccaggtgtgtttgctgaggtggaagcagaggcactgaccatgcattttagcttggacagtgaatctgagtctttctactatttccatgcatatcttaaaaaacaagttttaaaagtatttcatgtaggtcaccacgcttcttgggaaaataatattcataaatgtcaccaaaaacttctggactaatccccaaagatagtgaactgagctactgagtgtagtttttgtctgatcaggtgaaacacttaactctgtgtttcattcaggccaaagaaaattgacaaggatatcatcaaattaagttagcctctactaataagccaggaaaatgagtgatgtgaatctatgacaggaccctgaaacctgtagatgtggttgtggccagtcaactgggtgaggaatcactgagcctcagtaagttaagccagaccattgcaatatttgtgtggtcagtgtaaccaaggtgcagtttgatgtatgaattaaatgaaaaccatactttgagctaagcagatggtttcttcagtatcataggcacctgagtgttatctccggagtaggtacctcctaatggatgtacatgtcagttggtacaggttgacatttcaggtatgttttcacgtgcctctggtttgggtcatcacactgacatcttgttctggttatggcagtagacaggagtttatttctattacatggttaatcgaacttgtaggctgcttttactcttaggaggatcagagtatcttacagaagacataggagttgaagctagcacttctgaaaaggtctgggctttctcttagcttttccagagagcatggggaatttcctagttcagtgtgccaggggtggttgtgctatattgggggaaagtctgcattttattatagtaggtagccttccgatttcatcttgaatatcaaatactcttcactgtacctcaataactttctccaccacgactgggagctttatgtttctactctgcattcttcactaaggtattttggaccacaaaacatactcctctctgattccctattcacgaatcacagtctggatttttgaagaccaggcattccttttcatgaaactctgctttttgctgatgatctggaggcaaatgtgtatgcaaaatcgccccaatcagcctggcattttgtggctaggacagggcccctgggcattatgcacctgctgtcaggcataggcgcaccacctttagagggggaagcggtccacctggaaggggatggtggtcaagggcaggtgggaaatacttctttctgaaggcatgggccagatttctctttctgcccagcagttagaggtctactgaataagagatggtcccccgtcccatccctcccagttgcttttgaactcctgaagcatagctgaaacagccaaagtcactttaacttgttccctgactgtccattcaccctttctagtggtagattagcaacttctattggctggttgtcaaaacagtttgtgtcccgatgtttgaaaacggctcttgtctagaagagaattaacagggagatcaataacgacaggtgacttttttttccatttgccagaacgatgccatttgagaaaccagagggttaagtggtgtttttaagttagtgaacatatccagaggtagaaacgaggccagcctgttgtccagtctacctcccacctttaaacaggttttcagacacccgcagagcagagccagggaaaaatcccctgccggctttgctctctgaatcacatgagactggtgggaagtggggtgggtgtgtgtgtgtgtgtgtaggggggtaagggtgggtaaccaactggaaattatgggatcctagggacttttgagctttggttgagtgcttgcacgataagcaaagttttcttcttgtacagattgttacgctggagccttatctgtgacacccaaacatcagctcattgggtcaaaaatcacttgattacctgcaatagatattttgtctacagaaggccagacatcttgatggagtgagtcttttggctgggcctttctgtgtttgatagataaaagccccaccagctctgtctgaggttctaccaaactgatgtagcattctcttttctggactttgctgtgtctgtccagctactgcacaacgctatagctgcacactctcatgcttgctcacacttgcttacacttgccctcacacatgccctcacacatgctcacacttaccctcctatgctcacacaggttcccccttgctcaccccactcacacaggtctgaaatggcatgttcagcgtttcagtcacataaccaacccctggccctcagacccacactagacactgagattgtttctgtgctgccctaccttcccacagagttaagcctttcgggcctcctgtggcgctttcttcatccttgctgaggaatgagtgtgtatgacttggtgtgcaggcagggggtgacagtatatctgcttagtagggatcagacacttgaaatttgctcagaaatagttgcattacacgcccagtgtgcaatggctgaaattcaggcacattcatgcttactgttctctgagatctgaacaaaatcaaattgcactgagcaaggatagtgctcaatcttttgttctttctgacaactaaaaattaaccagcggttgtttacttccctatataattctgtttaagagaatctggaccattgagacaccaggcttaaaatgttgtattaagatataaaagtaccttactttaaaaatagatttttattgatttatttcaaaatttttctgtcagttatatgtac

SEQ ID NO: 102 - DNA, 4126 bp, Homo sapiens
gttccgcctggtggtgaagacagccctgaagctgctgctcgtctttgtagagtactcggagtccaacgcacctctcctaattcaggctgtcactgctgttgacacgaaaagaggggtcaaaccttggtcaaatatcatggaaatcctggaggaaaaagatggagttgatacggagctactggtttatgcaatgactttggtgaacaagacgttatcaggactaccagaccaagacaccttctacgacgtcgtggactgcctggaggagctgggcattgctgctgtgtcccagaggcacttgaacaagaaagggactgacctggacttagtggagcaactcaacatttatgaggtggcgctcaggcacgaggatggcgatgagaccacggagccaccccccagtgggtgccgggaccggaggagggccagcgtgtgttccagtggcggaggcgagcaccggggcctggaccgcagaaggagccgcaggcactcggtgcagagcatcaagagcaccctgtcggcccccaccagtccctgctcccagtcagctcccagcttcaagcccaaccaagtgcgagatctgcgtgaaaagtcatcaccgagtggtcttctcacatcatccttcaggcagcaccaagagtcactggcagcagagagagagaggcggcggcaggagagagaagaaaggttgcagagaatagagcgggaagaaagaaacaaattcagccgagattatttagacaaaagagaggagcaaaggcaagcaagagaagaaagatacaaatacttggaacagttggcagctgaggagcacgagaaggagctgagaagccggagtgtgagccggggcagagccgacctctccttggacctgacctcgccagcagccccagcctgcctggctcctctgagccatagcccctcatcttcagactctcaagaggctctcacggtgtctgcctcctccccaggaacccctcaccatccccaagcaagtgccggggatcctgaacccgaatcagaggcagaaccggaagcagaggcaggggcggggcaggttgctgatgaagctggccaggacatagcctctgcccacgagggtgcagagactgaagtggagcaggcactagagcaagagccggaagaaagagcctccctcagtgaaaaagagaggcagaacgagggggtgaacgagagggacaactgctctgcctccagcgtctcgtcctccagcagcacgttggagagggaggagaaggaggacaagctctccagggacaggacaactggtttgtggcccgcaggtgtccaggatgcaggtgtaaatggacagtgtggcgacatcctcaccaacaaacggttcatgcttgacatgctgtatgcccataacaggaagtctccggatgatgaggagaagggggatggggaggctgggaggacccagcaggaggcagaggcggtagccagccttgctaccaggatatccaccctgcaggccaactctcagacccaggatgagagtgtcaggagggtggatgtcggctgtttggacaatcggggcagtgtgaaagcatttgctgagaaattcaacagtggggacctggggagaggttccatctcccctgatgctgagcccaatgacaaggtcccagaaacagcgccggtgcagccgaagacagagtctgattacatctgggaccagctcatggccaatccaagagagctcagaatccaagacatggatttcactgacctgggggaggaggatgacattgatgtcctagatgtggacctgggtcacagggaggcccctgggccacctcccccacccccacccacctttctgggtttgccgcccccaccccctccgcccctgttggacagcattcctccccctcctgtccctggtaatttattggttcctcctcctccagtgttcaacgctcctcagggcttagggtggtcccaggtacccaggggtcagcccacattcactaagaaaaagaagaccatccgtttgttctggaatgaagttcggccttttgactggccatgtaaaaacaaccgacgctgcagagaattcctgtggtcaaaactggaacccattaaggtggacacttccagactggagcacctgtttgagtctaaatccaaggaactgtctgtctcaaagaaaactgctgcagatggaaaaaggcaagagatcattgttctggattccaagaggagtaacgccatcaatattggtctgacggtgctgccccctccaaggacgattaagatcgccattttgaattttgatgagtatgccttaaacaaagaaggaatcgagaaaattctaacgatgattcccaccgatgaggagaagcagaaaatccaggaagctcagctggccaaccctgaaatccccctgggcagtgcagagcagttcctcctcaccctgtcctccatcagcgagctctctgcacgacttcacctctgggcattcaaaatggattatgaaactacagaaaaggaagtagcagaaccactcctggacctgaaggaaggaatagaccagttggagaacaataaaaccttgggctttatcctgtctactctcttagccattgggaactttctaaatggaactaatgccaaagcgtttgagttaagctacctcgagaaggttccagaagtcaaagacacagtgcacaagcagtcgcttctccaccatgtgtgcaccatggtggtagaaaacttcccagacagctccgatctgtactcggagatcggggccatcaccaggtcagccaaggttgactttgatcaacttcaggataatttatgtcagatggagagaagatgcaaagcttcatgggatcacctcaaggcaattgcaaaacatgaaatgaaaccagttttaaaacaacggatgtcagagttcctgaaagactgtgcagagcgaattataattttaaagattgtccatagaaggataatcaacagattccactcctttttactctttatgggccatccaccttatgcaattcgggaagtgaacataaacaaattctgcaggattattagtgaatttgcactagagtatcgcacaaccagggaaagggttttgcagcagaaacagaaacgggccaaccacagagagagaaataagaccagagggaagatgatcaccgattctggcaagttctccggcagttctccggcgcccccaagccagccgcagggtctgagctatgcggaggacgcggctgagcacgagaacatgaaggctgtgctgaaaacctcgtccccctccgtggaggacgccacccccgcgctgggcgtccgcacacgcagccgagcaagccgaggatccactagttcctggactatgggaactgatgactcgcccaatgtcacagatgatgcagctgatgagatcatggaccgcatcgtcaagtcagccacccaagtgcccagtcagcgagtggtgccgagggagaggaaacgatcccgggccaaccggaaatctttgcgaagaaccctgaagagcggcctgaccccagaagaagccagagccctgggcttggttggcacctcggagttgcagctgtgacactcataggttactcccaggagtgtgctgagcagaaggcaagctcttgctggatgaaacccctccaggtggggttggggagacttgatattcacatccaacagtttgaaaagggagagctcaattcccagcgtcaccccatggcttgtgttgcctgctacgcattgacttggatctccaggagtcccctgcacataccttctccatcgtgtcagctgtgtttctcttgattccgtgacacccggtttattagttcaaaagtgtgacaccttttctgggcaaggaacagcccctttaaggagcaaatcacttctgtcacagttattatggtaatatgaggcaatctgattagcttcacagactgagtctccacaacaccaaaatatccagatgtaaaccccaaacttgtacacaaaagaaagcacagattgtttacctgttgtggattttagatgtaacaaatgtttatacaaatacatacatgtacaccatgtttcaaatactaaataaatagagtttaatgcc

SEQ ID NO: 103 - DNA, 4425 bp, Homo sapiens
gagcaggctgtttagcaaggctctgaaaggagaccaccgctgtggggagaccgagacccccaagagctgcagcgaagttgcaggatgcaaggcagccatgaggcaccaggggaagatccccgaggagctttcactagatgacagagcgaggacccagaagaagtgggggagggggaaatgggagccagaacccagtagcaagccccccagggaagccactctggaagagaggcacgcaaggggagagaagcatcttggggtggagattgaaaagacctcgggtgaaattatcagatgcgagaagtgcaagagagagagggagcttcagcagagcctggagcgtgagaggctttctctggggaccagtgagctggatatggggaagggcccaatgtatgatgtggagaagctggtgaggaccagaagctgcaggaggtctcccgaggcaaatcctgcaagtggggaggaagggtggaagggtgacagccacaggagcagccccaggaatcccactcaagagctgaggagacccagcaagagcatggacaagaaagaggacagaggcccagaggatcaagaaagccatgctcagggagcagccaaggccaagaaggaccttgtggaagttcttcctgtcacagaggaggggctgagggaggtgaagaaggacaccaggcccatgagcaggagcaaacatggtggctggctcctgagagagcaccaggcgggctttgagaagctccgcaggacccgaggagaagagaaggaggcagagaaggagaaaaagccatgtatgtctggaggcagaaggatgactctcagagatgaccaacctgcaaagctagaaaaggagcccaagacgaggccagaagagaacaagccagagcggcccagcggtcggaagccacggcccatgggcatcattgccgccaatgtggaaaagcattatgagactggccgggtcattggggatgggaactttgctgtcgtgaaggagtgcagacaccgcgagaccaggcaggcctatgcgatgaagatcattgacaagtccagactcaagggcaaggaggacatggtggacagtgagatcttgatcatccagagcctctctcaccccaacatcgtgaaattgcatgaagtctacgaaacagacatggaaatctacctgatcctggagtacgtgcagggaggagacctttttgacgccatcatagaaagtgtgaagttcccggagcccgatgctgccctcatgatcatggacttatgcaaagccctcgtccacatgcacgacaagagcattgtccaccgggacctcaagccggaaaaccttttgctgctaaagatctggtgagccggttgctggtggtagaccccaaaaagcgctacacagctcatcaggttcttcagcacccctggatcgaaacagctggcaagaccaatacagtgaaacgacagaagcaggtgtcccccagcagcgagggtcacttccggagccagcacaagagggttgtggagcaggtatcatagtcaccaccttgggaatctgtccagcccccagttctgctcaaggacagagaaaaggatagaagtttgagagaaaaacaatgaaagaggcttcttcacataattggtgaatcagagggagagacactgagtatattttaaagcatattaaaaaaattaagtcaatgttaaatgtcacaacatatttttagatttgtatatttaaagcctttaatacatttttggggggtaagcattgtcatcagtgaggaattttggtaataatgatgtgttttgcttcccctttgtaaccaagtttattctgtactacaggagtggtgcttaccagggtctaaactccccctgtgagattaataaggtgcattgtggtctttctgtgttaataaaatgtgctctgaataacagaagtgggcctgtattctgattacttctttgtgctggtgatgacagccagggaatgaattatagttcaggcatatctcctgaagctgatatgactacatatagatgtgaaggacacttgattagttgacaagacctgtttatttaggatgcactaatcttggtctcttgcatttcagtcttaccaaaaatcagttttggtgcagtctgagacatggaaagaaaaaaaacaaaccattgaatcattcttgctcctgcaataccgttatactgcttttcagccccaattatccctgagcctgagtcatttctatgtgaagtcaggcgctcaggctgtgaccgtgttaacattttcagatcacgagggagccatttagtacattcatatgtcagaaatgcagtaaatggattacactggggctccaaggagctcagagttcaagcacaatcctacctgcagggcatacacccaggacacattccagatttctgtgctgaaatattggtctttgcagatgattctgggagtctgtgtgagctgacagcaagacatatcctaatatttcccaaattgaccttcctagattatgaatgacctggttagtaggccacaaaatctagtcaagagtgtggctttttcacgtctaccttccctaacagttttggagccatctgggcggaggcgtgtgttagttaggaaaaccggaacagtactagagaattcaacataaggaattgcttaatcaggttttggaaaatggaagaagcacaaaggaggctctggtataatttagagatagtaactgcaggaagtggctcctgttctttggagaaccaagggaagaagttggggttattagaacctattgaaggagaaatttcttgtagtggacactgtagtatgccactcaggtcctccaagactgaagggaataagctccttggggtgctgctggatgatggctctcagctttcagccctctacaggaattaccctccactggaagagacacctttcagctccctcctgaagcaggctatatcaaatgactagtccctgtagggtatggtggctcagctcctttgtcccaaacagggacaatactgaagggccatccaactacggacctgcccatgggggttggctgaactgttggttgagactgcatcatagcccactttctcccttgcccaatcctgcttctttcctttcccttccagaggtaatgatcctgagaccactccctaataagccttttggatgctaatctggattttagagttggcttctcgggaaaccaaaccgttgacaccccctagaaacttgaaaccacatcaaagaagtaccagctggtgctttaacctcagaagcttggagaaggggccctgtggagcagggactcagacccctgaggagtgggtgctgcccagcaggcagtgtaatgggactcattctgaacacgtgaaagaggctggaagctggattcagttgctactagaacatattttgataaagacaccagtaaccttcatttcactaaatccaaaagagaattttcaatcctcaaattagcatcacttgaccctattgaccactttctctttgaataatttctcctgttgactaccatgatgtcacatttttctggtttttttttctcctatacctttggatctcttgtatagattcagtcttcttccagttgctaaaagctgtagttccatccttagtggctagggaaatgcaaattaaaatcacaatgaaatatcactatacacccattagaatagctaaaattaaatggctaaaatgagaagactgaccttaccaactactagcgaggatgcagagtgactggaacttcccgtacattgctgctgggagtataaaatgggacttctcctttggagaatggtttggtagttcctttaaaagttaaacatgtacctaccatatgatattccacttctagatgtttacccagcagaaattcaagcatatgtcctatgaagacttcacaatatttataggtgctttatttgtagtagccccaaagtggaaacatcttgaatgggcatgatttggtgcatggataaacagattgtatatccacacaatgaataacagccacaaaaaagggatgaactattcatacacgaacaacatggatggactgccaaagaattaggctgaatgaaagaagaaaaaaaagactacattttgattatttcatttacatactattccagaaaatacaagtgaatctatagtgacagaaagtgatcagggggtttgctggagatggaaatggggagaggagggacagaaggattgcaagggaacacttggtaactttggggaagagggacgtgttcattttcttgaatgtaataatggatttatgggggtatatatgtcaaaacttaccaaattgtacacttttgttatgtgcagtttattgtgtgtcaattatacctcaataaagttgttaaaaatat

SEQ ID NO: 104 - DNA, 4238 bp, Homo sapiens
cccagatttggtcatgacagtaatggaagcaatctccattcttttgaatgccaagcctgattggccatcagcaaagcaacttcttggtgactctaactttctaaaaaggcttttagaatatgataaggagaacataaagcctcagatattggcaaagcttcaaaagtatattaataatcctgattttgtgcctgaaaaagtggagaaagtgtccaaagcatgtaaatctatgtgcatgtgggtaagagctatggatttgtactctcgagtggtcaaggtcgtcgaaccaaaaagacaaaagctccgcgccgcacaggctgaacttgacattaccatggctaccctgagagaaaagcaagcattactaagacaagtagaagatcaaatacaggccttacaagatgaatatgacaaaggtgtaaatgaaaaagaaagcctggcaaagaccatggccctgacaaaagcacgtctagtacgtgctggaaagctgacagcagcattagaagatgagcaggttcgatgggaagaaagcatacagaagtttgaggaagaaatatcaaatatcactgggaacgtgttcatagcagcagcttgtgtggcctactatggggctttcacagcccagtacaggcagtcacttatagagtgttggatccaggactgtcagtctctggagatcccaatcgatccttccttcagtctcattaacattcttggagatccctacgagatacggcagtggaacactgatgggctgccccgtgacttgatatcaacagaaaatggcattttggttactcaaggcagaagatggcctttgatgattgatccccaagatcaggcaaaccgttggataaggaacaaggaaagcaaaagtggtttaaagatcattaagcttacagatagtaatttcttacgaatactcgagaattcaatccgacttggtttacctgtcttactggaagagcttaaggaaaccttggatccagctctagaacccattcttttgaaacaaatttttatcagtggtggccgactactcatccgtcttggagactcagacattgattatgacaaaaactttaggttctatatgacaaccaaaatgccaaatccccactatctgcctgaggtatgcattaaagttaccattatcaatttcactgtaacaaaatcaggcctggaggatcagttgttaagtgatgtggtgcgacttgaaaaacccaggttggaagaacaaagaattaagctcatcgtgaggatcaacactgataaaaaccagttgaaaactatcgaagagaaaatcctgagaatgctctttacctctgaaggaaatattctggacaatgaagaacttattgacacactccaggattcaaagatcacttctggtgccattaaaaccaggctggaagaagcagagtccactgagcagatgatcaatgtggctcgtgagaagtatcgtccagtggccactcaaggctctgtaatgtactttgtcattgcaagcctctcagaaatagatcctatgtaccagtactcattaaaatactttaaacagttgttcaataccaccattgaaacttctgtaaagacagaaaatctacaacagcgcctggacgtactactagaacaaactctcctaactgcttatgtcaatgtttcaagaggactttttgagcaacataaactcatctacagctttatgctttgtgttgagatgatgcgtcagcaaggaaccctatctgatgctgaatggaatttctttctccgaggttctgcaggattggaaaaggaacgcccacctaagcctgaagctccctggctacctactgctacatggttcgcatgctgtgacttggaagaatcatttccagtttttcacggacttacccaaaatatattgtcacatcctatttccatacgcttaggatcttttgagacttatattaacccacagaaatgggaaggctattctaaaatgaaacacgaagataaacacatgagacaggaaaaggaggcagcacaccaagatccatggagtgcaggattgagttctttccataagctaattcttattaaatgttgtaaagaagaaaaggtggtttttgctcttacagactttgtgatagaaaatcttggaaaacagtttatagagacaccacctgtggacctgcctaccctgtatcaagacatgtcatgcaacactcccctggtattcatcctaagcacaggctcagatcccatgggtgcatttcagaggtttgccagggaaagtggatattcagaacgggtgcagtcaatttcactggggcaaggacaaggacctattgctgaaaaaatggtcaaggatgcaatgaaatcaggaaactgggtatttttgcaaaattgccatcttgctgtttcttggatgttggcaatggaagagctcattaaaaccttcacagatccagatagtgctatcaaggacacttttcgactttttttaagctccatgcctagtaatacatttcctgttacagttcttcaaaattctgtcaaggtgaccaatgagcctccaaaaggcttacgtgcaaatatcagacgagcatttactgaaatgacaccttcgttttttgaagaaaatatacttggaaaaaaatggagacaaataatatttggcatttgtttcttccatgcaattattcaggagagaaagaagtttggcccccttggttggaatatctgctatgaatttaatgacagtgacagggaatgtgctttactgaatctcaaactctattgtaaagaaggaaagattccctgggatgcactaatttacattactggtgaaattacttatggtggtagagtcacagacagctgggaccaaagatgccttcgtactatcttgaaaagatttttttctcctgaaacattagaagaagattataaatactctgaatcaggcatctattttgcacccatggctgacagcctacaagagtttaaggactacattgaaaatctgcctttgatcgatgacccagaaatttttggaatgcatgaaaatgctaatctagtcttccagtacaaagagaccagcactttaatcaacaccatacttgaggttcagccaaggtcatctactggtggagagggaaaaagcaatgacgaaattgttcaagaacttgttgcttctgtccagaccagagttccagaaaaactggaaatggagggtgcttctgagagcctttttgtcaaggatcttcaaggacgtctgaactccttgaccaccgttcttggacaggaagtggaccggtttaacaacctgctgaagttaattcatacttctctggaaacactcaacaaagccatcgctggatttgtggtgatgtctgaagaaatggaaaaagtgtataacagtttcctcaacaaccaggttcccgctctgtggtccaacacagcctacccatccctgaagccactaggatcatgggtcaaagaccttatcctgaggacctcatttgtggatctgtggctcaaaagaggacagcctaagtcctactggatctctggtttcttctttcctcaaggatttctaacaggaactcttcaaaatcatgctcgaaaatacaatttgcctatagatgagctgagtttcaaatacagcgtaattcccacctatcgggatcaagctgcagtgatagaagctgccaagacagtgcaatttggacaagaactgcccatggacatggagttgccctctcctgaggatggtgttcttgttcatgggatgttcatggatgcttctcgatgggatgataaggagatggtgatagaagatgcattgcccggacagatgaatccagtgctgcctgtggtgcattttgaaccacaacaaaactataagccaagcccaacactttaccactgcccactttataaaacaggagcccgggcaggaacactctcaaccacaggacattcaaccaattttgtggtaaccgtcctgttaccctccaagcggtccaaagactactggattgccaagggatcagctttgctctgccagctgagcgaatgaaaaggtgccacctcagccctgaaaaagaaccaggccagagatctttcctaatgggagcaaaaggtttgaataatttatatgtgagcaaaacggtgttaattctgatttgacttaaacgtattgtgacttttatttctcttatgaccttaaaataaagtgtttgagttctttc

SEQ ID NO: 105 - DNA, 4132 bp, Homo sapiens
gaaatacagaagcacagtcagcaaaagcaaagacccctcggggctgctcatctctgtgatcaggactctgtctactagtgacgatgtcgaagacagggaaaatgaaaagggtcgccttgaagaagcctacgagaaatgtgaccgtgacctggatgaattgattgtacagcactacacagaattgacgacagccattcgcacataccagagcatcacagagcgcatcactaactcccgaaataaaataaagcaggtaaaagagaacctgctttcatgcaagatgctgctgcactgcaaacgggatgagcttcggaaactgtggattgaaggaattgagcataagcatgtcctgaacttgttggatgaaattgagaatatcaagcaagtgcctcaaaagctggaacagtgcatggccagcaagcactatctcagtgccactgacatgttggtgtcagcagttgagtctttggagggccccctgctccaggtggaaggactgagtgaccttcgactagagcttcacagcaagaagatgaaccttcacttggttctcatagatgaactacaccggcacctgtacatcaaatcgactagccgagttgtgcagcgtaacaaggaaaaagggaaaatcagctccctcgtgaaagatgcttctgttcctctgattgatgttacaaacctccctactcctcgaaaattccttgatacctctcactattctactgctggaagctcaagtgtgagggagataaatctgcaggacatcaaggaagatttagaattggatccagaggaaaacagcaccctgtttatgggtatcctcattaagggcttggcgaaactgaagaagatcccagaaacagttaaggcaatcatagagcgcttggagcaggagttgaagcaaattgtgaagaggtctacaacccaggtggcagacagtggctatcagcggggggagaacgttactgtggagaaccaaccaaggttgcttctagaactgctggagttactgtttgacaagtttaatgctgtagccgctgcacactctgtggtcctgggatacctgcaggacactgtagtgactccactgactcagcaggaagatatcaaactgtatgatatggcagatgtatgggtgaagatccaagatgttctacagatgctattaactgagtacttggatatgaaaaatactcgtacggcctctgaaccatcagctcaactaagctatgccagcactggacgagagtttgcagccttttttgccaagaagaaacctcaaaggccaaaaaattctcttttcaagttcgaatcgtcctcccatgccatcagtatgagcgcctatctgcgagaacagagaagggagctctatagtcggagtggagaactgcaagggggtcctgatgacaacttaattgaaggtggaggaacaaaatttgtctgcaaacctggagccagaaacattaccgtcatattccacccattactaagatttattcaggagattgagcatgctctgggtcttggcccagccaaacagtgtcctcttcgagagtttctcaccgtgtacatcaaaaacatctttctcaatcaagtcttggctgagatcaacaaggagattgaaggagtcactaaaacatctgaccctttgaagattctggccaacgcagacaccatgaaggtgctgggagtgcagcggcctctcctacagagcacaatcattgtggagaagacagttcaagacctcctgaacctgatgcatgacttgagtgcatattcagatcaattcctcaacatggtgtgcgtaaagctccaggagtacaaggacacctgcactgcagcttacaggggtattgtccagtcagaagaaaaacttgtcatcagtgcatcctgggcaaaagatgatgatatcagcagactcttgaaatctctaccaaactggatgaatatggctcaacccaaacagctgaggccaaaaagagaggaggaagaagatttcataagggcagcttttggcaaggagtctgaagttcttattgggaacctgggtgataaattaatccctccacaagacatccttcgtgacgtcagtgacctcaaagccttggccaacatgcatgaaagcctggaatggttggcaagtcgaacaaagtcagctttctccaatctttctacatcccagatgctttctcctgctcaagacagccacacgaacacggatctccccccagtgtcagagcagatcatgcagactctcagtgaacttgccaaatcgttccaggatatggctgaccgctgcttgcttgtcttacatctggaagtgagggttcactgtttccactatcttatccctcttgcaaaggaggggaactatgccattgtggctaatgtggaaagtatggattatgaccccctggtggtcaagctcaacaaagatatcagcgccattgaagaggccatgagcgccagccttcagcagcacaagttccagtatatcttcgaaggcctgggccacctgatctcctgcatcctcattaatggtgcccagtacttcaggcgcatcagtgagtctggcatcaagaaaatgtgtaggaacatttttgttcttcagcagaatttgaccaacatcaccatgtcgcgggaggcagacctggactttgcaaggcagtactacgagatgctttacaacacagctgacgagctcctgaacctggtggtggaccagggtgtgaagtacacggagctggagtacatccacgctctgaccctgctgcaccgcagccaaactggggtgggggaactgaccacccagaacacgaggctgcagaggctcaaagagatcatctgcgagcaggctgccatcaagcaagccaccaaggacaagaagataactaccgtttagcagggcgtactgcggttggtgacgggggtcccctcagtcacactcacttttttccttggtatgttattgagtatattctgagcttagttttctctacagtgatactttagtggagaggaggtgtaaggattctttctctctggttttggcttttcatataaatgctaaaggaaggcgacagtacagagtgttttggttgaacaactactttaatgcagtcaaatctaacgggactagggtgggatagggaggaaggtggtatcaaattgttggactctgaaaaacaagtggatggattactaatatttgatttattactcaatatatatataattccagccttggaaagtaggaaagtaggctgctacctaacttttagtcccttccaaaaccatttagtagggttctattacataaacagtagggtttttcctctcctgaccttatccgtttacagttcaatgaaataagtgtatgtgcattgctgtctgtctctattgccaaaatcaaataaatggcttctcagctgctgtttacaacaaacttccctaaccaaaacagaacctctaatttagggctaggaatagaagtcttttgatcccagtccgtgggacagttttgtatgctgtatcttgtacacaggttgtaggttggtttattgccattttgttttatttctgctatataaaaaccaagagccagacaattagacaactatggaggaatgaaaggcaattcaaacatctgcttgattcccgccccgccacccctaatttctgagagaataatggttagagaacattgcatctcacttgaaacatcctttgggggtaaatgattcttaggtgctcacttggtctgagctcagctgaatgcagggaagatgggacagagtgacatttctcctctgtgcggcctccagctgagcctgtctctgaattgttccctcccccgcaatgtgggcacttaccatgttcctggcacactggacctcaccatgtcccccggtcaccagtcctcttgctgcccatggttcataggtcatagaaggcagcaatgcactgactgggccacatcttgaaaactcgtggaaagggaaaggggaggagatgggactttgaccacacacagtgatgcctcacaccctgaaggtgggggattttgtacctgtttgtacaactttggtcttgatgggaaaaatggagaattaaaaagtgttttgagaagctt

SEQ ID NO: 106 - DNA, 7152 bp, Homo sapiens
agagatttccacagaaggactgggatgatacaccttttccacagggaattgagttgttttgtcagcctggcgggtggcagctgtccagagagaggaagcagccaacgttctttgtggttgtcctgacagacattgactcagatcgacattactgctcatgcctaaccttctatgaggcagagatcaatcttcagggaacaaagaaggaagagattgaaggtgaagcaaaagtgtctggtttaattcagcctgcagaagtgtttgctcccaaaagcctggtgcttgcctgggtttgatctataccgtgtatgtggacagcctgaatgtctccttggaaagtctaattgcaaacctttgtgcctgccttgtcccagcggctggagggtctcagaagctgttttctttgggtgcaggagatagacagttgatccagactcctttacatgatagtcttcctatcacgggcactagtgtggctctcctgttccagcaattgggaattcaaaatgtcctcagcctcttttgtgcagtcctcacagaaaataaggttctcttccattctgcaagtttccagagacttagtgatgcttgtagagccctggaatctttaatgtttcctcttaaatatagttatccttatatccctattctcccggctcagctactggaagttctaagttccccaacgcctttcattattggagtacattctgtctttaaaactgatgtccatgaacttttagatgtaatcatagcagatttggatggaggcactattaaaattcccgaatgtattcacctctcttccctcccagaaccacttctacatcagactcaatcagctctttctttgattttacacccagatttggaagtagcagatcatgcttttcctcctccacgaacagctttatcccactcaaaaatgctggataaagaggtgcgagccgttttccttagattatttgcacaactcttccaaggatatagatcctgcctgcaacttataagaattcatgcagagccagtaatacatttccacaagacagcattcttggggcagcgtggtttggtcgagaatgatttcctcactaaagtactcagtggaatggcatttgcaggttttgtttcagaaagaggtcctccttatagatcttgtgatctctttgatgagttggtagcctttgaagtagagagaattaaagttgaagaaaataacccagtgaagatgataaagcatgtcagggaacttgctgagcaactattcaaaaatgagaatccaaatcctcatatggcattccagaaagttccacggccaacagaaggatcccatttgcgagttcatattcttcctttcccagagattaatgaagcccgggttcaggaattaatacaggaaaatgttgctaagaaccagaatgcacctcctgccacacgaatagaaaagaaatgtgttgtgccagcaggtccacctgttgtttcgataatggacaaggtgacgacagttttcaacagtgcacaaagactagaagttgtcagaaactgtatctcattcatatttgaaaataaaattttggaaactgaaaagacccttcctgctgcactcagagcccttaaaggaaaggcagcaagacagtgtctcactgatgaattgggtttgcatgtccagcaaaaccgggcaatattagaccatcaacagtttgactacataataaggatgatgaattgtactctacaggattgttcaagtttagaagaatacaacattgccgcagcattactccctttgaccagtgctttctataggaaacttgcccctggagtcagccagtttgcttacacgtgtgtacaagaccaccccatttggacaaatcagcaattttgggagacaaccttttacaatgcagtgcaggaacaggttcgctccctttatctctcagccaaggaagacaatcatgccccgcatctgaagcaaaaggataagcttcctgatgaccattatcaggagaagacagcaatggacctggcagctgagcaactacgcctttggcctaccctgagcaagtcaactcagcaagagctagtgcaacatgaggaaagcactgtctttagtcaggccattcactttgcaaacctcatggtgaacctgctagttccactcgacacaagtaaaaacaagctcctaagaacatcagcgccaggtgactgggagagcggaagcaacagcattgtcacaaacagtattgcaggaagtgtagctgagagctatgatacagagagtgggtttgaagattcagagaatactgacattgccaattctgttgtgcggttcattacccgatttattgacaaagtttgtacagagagtggagttactcaggatcacatcaagagccttcattgcatgataccaggaattgtagctatgcacattgagaccctagaagcagtacatcgagaaagcagaagacttccgcctattcagaagcccaagattcttagacctgctctgctgccaggagaagaaattgtctgtgagggtcttcgagtcttgctggatcctgatggaagagaagaagctactggaggtcttcttggaggccctcagctcctgccagcagaaggagccttgttcctcaccacatacagaattctcttcagaggaacaccccatgatcagttagtgggtgagcagacagttgtgcggagctttcccattgcctccatcaccaaggagaagaagattacaatgcagaaccagctacagcagaacatgcaagaaggactgcagatcacatcagcatcttttcagttgattaaggtagcatttgatgaagaagtcagtccagaagtagtagagatctttaagaaacagctgatgaagttccgttatcctcagtccattttcagtacctttgcttttgctgctggacaaactaccccacaaataattttaccaaaacagaaggaaaagaacacttcttttcgtaccttctcaaaaacaattgtgaaaggtgccaaaagggcagggaaaatgacaattgggcggcaatatttactgaagaagaagacagggacaattgtggaagaaagagtaaatcgtcctggatggaatgaagatgatgatgtatctgtttcagatgagagtgagctccccacaagtaccaccctgaaggcctccgagaagtctacaatggaacagttggtggaaaaagcttgtttcagagactatcagcgtttaggtttaggaaccataagtggcagctcttcccgttcaagacccgagtattttagaattactgcctccaacaggatgtattcactctgccggagctatcctggccttttagtcgtacctcaagctgtacaggacagtagtttaccaagagtagctcgctgctatcgacacaatcgcctgcctgttgtatgttggaagaactcaagaagtggtactctgctcctccgatctggaggattccatgggaagggagtcgttggtcttttcaaatctcagaactcccctcaggccgctcctacctcctctttagaatcttccagtagcatagaacaagagaaatacttgcaagccttactgaatgctgtttctgtccatcagaaactcagaggcaacagcactcttactgtcaggccagcctttgctctatctccagggactgaaaggaggacttcaagaatgtccactgtgcttaagcaggtagtgccaggacatttggatgtaaacccatccaatagctttgctcaaggaggtgtgtgggcaagtcttcgctctagcactcgcttgatcagctctccaacatccttcattgatgttggcgcccggctggcaggcaaggatcactcggcctccttcagtaacagcagctacctacaaaaccagctcttgaaacggcaagcagccctttacatatttggtgaaaagtcgcaactaaggaacttcaaggtagaatttgctttaaattgtgagtttgttcctgttgaatttcatgaaatccggcaagtgaaagccagttttaagaagctgatgagggcttgtatcccaagcaccatccctactgactcagaagtgaccttcctgaaagcgctgggagattctgagtggttcccacagcttcacaggataatgcagctggctgtggttgtatcagaagtacttgagaatggttcctcagttttggtctgtttggaggaaggctgggacatcactgcacaagtgacatccctggttcagttactcagtgatcccttttataggacacttgaaggcttccagatgttggttgaaaaagagtggctctcttttggtcacaaattcagtcagaggagcagcttgaccctcaactgtcaggggagtggttttgctccagtcttcttacagttcttagactgtgtacaccaggttcacaaccagtatccaactgagtttgaattcaatctctattacttaaagttcttggctttccactatgtgtctaatcgctttaaaacatttctcctggattcagactatgaaagattagagcacggaactttatttgatgataaaggagaaaagcatgccaaaaaaggagtctgtatttgggaatgtattgacagaatgcacaagaggagtcccattttctttaattatttatattcaccattggaaatagaggctctaaagcccaatgtaaacgtctctagcctcaagaagtgggattactacatagaagagaccctgtccacaggcccttcctatgactggatgatgctaacccccaagcacttcccctccgaagactctgacctggctggagaagctgggccacggagccagaggagaacagtgtggccatgctatgatgatgtcagctgtactcagcctgatgctctcaccagccttttcagtgaaattgaaaaattggagcacaaattgaaccaagcccctgagaagtggcagcagctgtgggaaagggtaaccgtggaccttaaagaagaaccaagaacagatcgctcccaaagacacctgtcgagatccccaggaattgtgtctaccaacctaccttcctatcagaagaggtctctgctacatctcccagacagcagcatgggggaggaacagaattccagcatctccccatccaatggagtggagcgaagagcagccacgctctatagccagtatacatccaagaatgatgaaaacaggtcctttgagggaacactttataaaagaggggctttgctgaaaggttggaagccccgttggtttgttttggatgtaacaaaacatcagctgcgctactatgactcaggtgaggacacaagctgtaaaggccacattgatctggctgaagtagaaatggtcatccctgctggccccagcatgggagccccaaagcacacaagtgacaaggctttctttgatctcaagaccagcaaacgtgtgtataacttctgcgcccaggatggacagagtgcccagcaatggatggacaagatccagagttgtatctctgatgcctgatgcccatggtcaacccacgcagaagaaacagaagaactcatgctgccagatagatagaaaaagaagcatggatccttgaggagctgacaacaagttatcccagggcctgaggttctcctgcccagtcccctcttgcaggggttgctatatctacttaacctgaataggtgtttcacacaggtctggtcaacagccccatgcactccctgtatcttgcactaaatttttctaacagggtcttagtggttaatgatcagaagatgtctcctgagccaactgtgaacctcacccaggcaaaatggctaccacctacttgggtccttcttcatgaaagctatagatccttttttgttctctgaggtcataatttcctcggagacctgtttaacaagcaaaaatcaaaaccctccaagattgtctcatattctacctggactaggtttcctatgagagacatctacttgtaatgcctgacctttgagatgctcagttctctggtgctgccaaaagatgtttccatggtccgtgctctgccagtggggttcacaacaagagacgtcattgttcagtagcaggcaaagagggagcacacagcattattctgatggaaaaagattatccagggaatggtacaacaatgaccagcccaatgcaggaaaacactacttccaaaacactgaattctctagaccagaggtgctctgaggatccagggccttgtgttcttatgtatcttctgcttcctgacagcttctttttcaaaataacatgcaaaaaaagctgaatgcactaactcacaaaacaaacacttgcactgaattcccaatgaagtgaagatgttggaaagacagaggccagctatttaggaccatacgcacctgtgacaagggctgtgttgaccacagtcacactgtggcatgactggatacccaaactacacttctacacatgaaaagtaagaactgtctttagattttctttactttgataacttgtgattgtttagcttaagacccaagaaatgctgtttgctcatggtaaacagaaacagcatcttcgctacaaccactgacaccagctggcgtcataggtagctagatcattgcatttgttttgaaatgttaatatgttaaatactaaactaatatttcaaaaatgtgtatatatgatttctatatccttgtttttcagatagcctgcttataatttaatataaattaactgatgcattcataagatttcaataatgaaatggttcccttttaaaaaataaaaatactttgtagattaaaaataaatcagaatttcaaatttaaaattgtccacacactaggaaatagaactgtgttaatatataagaaatttggggataattaagaatgaaggacttttctatcatttccattttataaattgccacctgtgaaaatggtttttgcacattatttgtatttttctttgtatatgaaataattttttgtactttgtaaaatatggagcccattgtaccttcaactatttgagactatacacagtgcttcttttgtaactggattactttaactttcgtgaaggcattacattgcctcacattcactaaccaccttgaattaaatttatttcttaag

SEQ ID NO: 107 - DNA, 3949 bp, Homo sapiens
gccattccctgtagcaggattaatcatttataaaataaagtccctatccattacttgcttcacataactttttttatgtgaaatagtgttttattgaattaagttccatatctgagttttttagataacatattgattttaaaatctgagtgttataattcttcaaacaaataaagtttgtcttggagaccttcaaattagcttttcctttttgcaatagctgttcatagtttcaagttgagtcgaaaccatgtggactggcacagtgtggatgaagtatatctttatagtgatgcaacaacatctaaaattgcaagaacagttacccaaaaactgggattttctaaaggtaattgttaaatattactagagcttatcaaaattttgggaatctgactttctctcatattcaaaatagacaattcatattctgtttttagtatgttttaagtatattaaatttagtgacagattcctttttaaatgaaacttttattaagttgattgagttgacatgtgttcatcaaggaataattattatatatttagaatgatttgacaaaattaataaatatcttttatacttctaaaagcacaaaagctgttaaacctaaaatgtggcagttgaaatatagtgtcaaggaagatgaggactgaaagttttccattgtatttagtgatctggaggtcactggtgacttagatggattgatggggcagaaaccagatcagcatgggttgaagcgtaaatagaaggtgaagcaatggaagcaatgagaatagacaactcctttttttttttcttcttttatttttaagatggggtctcactctgtctcccaggctggagtacagtggtgtgatcatagcacatcataacctggaactaattcctgggctcaagcaatcctccaaactcagcctcctcagtaactaggattacagggatgcatcactatgcccagctaattttttttatttttttgtagaaacggagtctccttgtgttgtccaggctggtctcaaatttttgggcacaagccatcctctcgccttggtctcccaaagctctggggttacaggcttgaaatacagtgcctggcctgacaactgtttagagaagtttgactaaatgaaagaaaagagagaatgatacctgggaaagatgtgagagcattatcaaaaaataaatgtaaaaagaattttaaagtttgataaaatttttatatcctattttaaaattttaatttcatcaataagtgtgctttgaatatctttttatgtttattagttatatttattttgaattaccttccataactttaacttattttgctatttgaatggttgtctttactttttaattagtaagctctctctgtatacttaagtaattatgtgttatattttgcatatttttttccagtttgccatttcttttttcctgatattttcttattataatatagaagctttaaatttttatatattcagtttgtccttctttccttccatttctttctctttatggtttctggctttggtgttgtgtccagttcactttatatcacagctgatcaatatataccttcttacagtttttatttcctcccccacagccagtgaaattttttcataatattccttttacttcttttttttcttttaacatattgtggaaatgctatttctcagattaaatagtaaacttagaattataatttttctacagcatcaagtagtggtaccagacttcatagaggttatgtagaagaagccacattagaagacaagccatcacagactacccatattgtatttgttgtgcatggcattgggcagaaaatggaccaaggaagaattatcaaaaatacagctatgatgagagaagctgcaagaaaaatagaagaaaggcatttttccaaccatgcaacacatgttgaatttctgcctgttgagtggcggtcaaaacttactcttgatggagacactgttgattccattactcctgacaaagtacgaggtttaagggatatgctgaacagcagtgcaatggacataatgtattatactagtccactttatagagatgaactagttaaaggccttcagcaagagctgaatcgattgtattcccttttctgttctcggaatccagactttgaagaaaaagggggtaaagtctcaatagtatcacattccttgggatgtgtaattacttatgacataatgactggctggaatccagttcggctgtatgaacagttgctgcaaaaggaagaagagttgcctgatgaacgatggatgagctatgaagaacgacatcttcttgatgaactctatataacaaaacgacggctgaaggaaatagaagaacggcttcacggattgaaagcatcatctatgacacaaacacctgccttaaaatttaaggttgagaatttcttctgtatgggatccccattagcagttttcttggcgttgcgtggcatccgcccaggaaatactggaagtcaagaccatattttgcctagagagatttgtaaccggttactaaatatttttcatcctacagatccagtggcttatagattagaaccattaatactgaaacactacagcaacatttcacctgtccagatccactggtacaatacttcaaatcctttaccttatgaacatatgaagccaagctttctcaacccagctaaagaacctacctcagtttcagagaatgaaggcatttcaaccataccaagccctgtgacctcaccagttttgtcccgccgacactatggagaatctataacaaatataggcaaagcaagcatattaggggctgctagcattggaaagggacttggaggaatgttgttctcaagatttggacgttcatctacaacacagtcatctgaaacatcaaaagactcaatggaagatgagaagaagccagttgcctcaccttctgctaccaccgtagggacacagacccttccacatagcagttctggcttcctcgattctgcattggagttggatcacaggattgattttgaactcagagaaggccttgtggagagccgctattggtcagctgtcacgtcgcatactgcctattggtcatccttggatgttgccctttttcttttaaccttcatgtataaacatgagcacgatgatgatgcaaaacccaatttagatccaatctgaactcttgaaggacatgaatggcctaaaactgattttttttttttccgttaaaatgtgtgtgtcaagatacggagatttcagggttaaagtatatttcagttttctttagggcaacatatatttgaatttaaaagcactttatttaaaaaaaaaagaagttttcagttctgaagaagtcatttacagtttgcatcattttaattatgagtctgacaaaaccttctccagagaatcaagcaagacctggatgtgaagaaggtttgggtaaactgcatgtaaaggctacaaatcacaatctgattcctcccaaatataaaggcatatggaacataatgtattaaccaaagtatgttataaatcaaaaatggtcaaggttcagcatattctatatgaagatcacaaggtggtatcgttttagatttctatgaaggctttcatttgtacatccctttgaaaaaatataacagatttaaaatgttttgaatttaacttgtttagaaaaactaatgcttaaaacaatatttgaactactgtatttataatttattacctctaattgctttatttcagtgtatgagacattactgttttaatgtttgctttgaacataatttaagaaccagatttattttctatagtgataaacccttttttctcagaactccatctttgtactcttcagatgaatatatagacactgtggcatacattttttttcattaaaaacttatggcttcat

SEQ ID NO: 108 - DNA, 3745 bp, Homo sapiens
attatggtctgtcgtgcgctgctgctgcttttctgctcctggaagcggccaaggggggaagcggcgagtcaacatggagctttcagcggtgggggagcgggtgttcgcggccgaagccctcctgaagcggcgcatacggaaaggacgcatggaatacctcgtgaaatggaagggatggtcgcagaagtacagcacatgggaaccggaggaaaacatcctggatgctcgcttgctcgcagcctttgaggaaagggaaagagagatggagctctatggccccaaaaagcgtggacccaagcccaaaaccttcctcctcaaagcgcaggccaaggcaaaggccaaaacttacgagtttcgaagtgactcagccaggggcatccggatcccctaccctggccgctcgccccaggacctggcctccacttcccgggcccgggagggccttcgaaacatgggtttgtccccgccagcgagcagcaccagcaccagcagcacctgccgcgcagaggcccctcgggaccgggaccgagaccgggatagggaccgggagcgggatcgagaaagggagagggagcgagagagggagcgggaacgtgagagggaacgagagcggggtaccagcagagtggatgacaagcccagctcaccgggggacagctcgaagaagcgaggccccaagccccggaaggagctcccggacccctcacagaggcccttaggcgaacccagcgccggcctcggagagtacctcaagggcaggaagctggacgacaccccttccggggcaggaaagtttccagccggccacagtgtgatccagctggcccgaagacaggactcggacctggtgcagtgtggtgtgaccagccctagctcagctgaggccacgggcaaactggctgtggacaccttcccggccagggtgataaagcacagggctgccttcctggaggccaaaggccagggtgccctagatcccaatggcacccgggtccgacatggctcaggcccccccagctctgtggggggcctgtaccgggacatgggggcccaggggggaaggccctccctcatcgccaggatccctgtggccagaatcctgggggacccggaggaagagtcctggagcccctccctgactaacctggagaaggtggtggtcacggacgtgacctcaaactttttgaccgtcaccattaaggaaagtaacacggaccaaggcttttttaaagagaaaagatgaatgctgggtgggtgtgtccaggaggagagcaggggagagagtgagcgtgagcttggcatagtgatttttatttctgggtgggatgtggccttttggctggtcccgtccctgatgtcacccccaccccaccagcccctttcatccctccttcctccccctcagtttttgttggaaagattatctctagagttatattttctattagatgtaaatatgttatttaagaaaaatatctaaatatatatatttcaactcgaagttgttttatttaaaggagagagactctcattgtgctttagttggggcagcccgaatgagctggggcaggaggggcccccttgccccagagctctagggaagttggggcctgggtacaggtttctgagagtgtctggaggggcttggcctgcccacctcacccctcctcccttctcccacagcccaatgccagactcctggcaccaaggcccggcccagatttgctctctcttcccattggccaggcaggccaacaaaaggttggctccccaatcagaaaaaagggggggtggggtcagtctgttttccttttttctattttttttttttttaaggtaaagaagtctattagggaaaaagtattaacttgaataagcttttcgtgtgtgatgttgaaggttaaaacgtccccagcaggcagggacaggaggtttctccccaggaccacaccaggaaatgcactttagggaggggtgtgtgtgtggtacacgcagatcgtgtgtatgtcatgtggataaaatctccccgttccctcgttcctttccttactccgcagaaagaaaagaaatccagcgaatctgtttacattcccgaaatgccaggataaattgggaggattgcgtgtcagtgctgagagttcgagacagttgttttgcaagaaaagtgttggggtggacttttccttttcgcgtcctctagctttgccaggagaagagacggtggcccccacctcccaggaagagttggacaagcctccctgcctggggagggcgggccgccagctctgtggtggacacatggccagacaggcccaccctgcgggacccacggagggaggcgcggcggcgggcgctgctaggagcagtggcttcgcacccagggcctctccacggccaggcttggagtgtggctgaggaccacggctcggagctcggagctggggctagactcacccccgcggctccggccgggcacgggaaggaggggcgaggcggggttttcatccaagaatgcgcatcggaacttttgctttttccttttttttcccccgtccttcttaaaagcaaaagctataatttataggtcttttcgattcgcagtgttctctatttgaactcgacattcaaactccgccaaagggggagggaggagcgggagttgggagtggggacggccgcggcggggaaggccgtgcgaggcggcggggcctgggacgcccctgcccggcggacttgaccgctctgcgctccgaggacgcagaatgcgcgcccctcttttgactcaaaagcacaaatcagtcccctccactccacccccgtctcttggagcacggatcccgcagcctccctgccctccccgcccttaaagggccagcgaagatctaacttcccattgcttgttgagggaggggcgcgggggccctgcacgccagaggaagcacagactcggggggagcgaggcggggagtcgggggtgggggagcttcgcgtggggtggggggtgctgggagggaaccccagcctcgtcctccgcactcccggcttctcagcctctcctccagactttcttgcctttaaagagagaaaaggagggaaacggtgtactacatgattgtgtttgtttttgaatatcaaattgcgcctataaagagaagcccctggaatggggatttttatctactcacatttgtaaaactggtattttagactttgtataaagaagcgccgttgaccgagtgtatctatttaaatgtcgatgctattttcagatgaaacttcactgaaggggcatgtctgttacctagtggacgggactgggggatacgcgtcttcacctggccgccgccttcccttctctcccgcctgtcctttactcccacctccctcccttcctgggggctgactttgccccttcccttggaccttctttccagccagctctgtccctgccgcccctccgtcctgctgtttgtccgtggccgtgtgtgtatgtgtctccttctctcgctcttgcgacgctgacctggggggtgggtgggcaggggccgggggccacgtggctgggagtctgcaaccgcgcagggtgtgtgcgctgttgggtttatttaattctaagatttgtacaaatctccaatcgatctccgcctcagctcaagagtgaagcttcggtacctatcttctgcggtcgtgaatgtctgtatccaataccgctttttacgtgtttaaatatatactttgtaaatag

SEQ ID NO: 109 - DNA, 3375 bp, Homo sapiens
gcggccgcttcccgggtaccccgacgccgaggccccggagccttcctccgctggggctcaggcagcggaggagccgtcgggggccggctcagaagagctgatcaagtcggaccaggtgaacggcgtgctggtgctgagcctcctggacaaaatcatcggggccgtagaccagatccagctgactcaagcacagctggaggagcggcaggcggagatggagggcgcagtgcagagcatccagggcgagctgagcaagctgggcaaggcgcacgccaccacgagcaatacggtgagcaagctgctggagaaggtgcgcaaggtcagcgtcaacgtgaagaccgtgcgcggcagcctggagcgccaggcggggcagatcaagaagctggaggtcaacgaggccgagctgctgcggcgccgcaactttaaagtcatgatctaccaggatgaagtgaagctgccggccaaactgagcatcagcaaatcgctgaaagagtcggaggcgctgccagagaaggagggcgaggagctgggcgagggcgagcggcccgaggaggacgcagcggcgctggagctttcgtcggacgaggcggtggaggttgaggaggttattgaggagtcccgcgcagagcgtatcaagcgcagcggcctgcggcgcgtggacgacttcaagaaggccttctccaaggagaagatggagaagaccaaggtgcgtacccgcgagaacctggagaagacgcgcctcaagaccaaggaaaacctggagaagacgcggcacaccctggagaagcgcatgaacaagctgggcacgcgcctggtgcccgccgagcggcgcgagaaactgaagacgtcgcgggacaagttgcgcaaatccttcacgcccgaccacgtggtgtacgcgcgctccaagaccgcggtctacaaggtgccacccttcaccttccacgtcaagaagatccgcgagggccaggtggaagtgctcaaggccaccgagatggtggaggtgggcgccgacgacgacgagggcggcgcggagcgcggggaggccggcgacctgcggcgcgggagcagccccgacgtgcacgcgctgctggagatcaccgaggagtcggacgccgtgctggtggacaagagcgacagcgactgagccgcccccgctgccacccaccccattcctcgctccttccgaacttcctctttcgcattctctctcggctcgagctggctgagatttttctaaattgaaaacacgcccccctccccacacctccaggaactccactcccagtcttagagctgttaggacccgatggggaggcagcccccgcagtggacagcccccgcttggacacagtccgagtggaatgggaagggaatggtcaatccctgtcctggttgtccaagtcgggatctcagaggaaattgcagtgattccacggttaggcccccctgggggggctgccttcccctcagcctctccccacaccacccacccagctgctgtcattccgctcactgagctcttcttcattctcaccctgatccctgggggactcaaagccaaaactgcccaaagaggaaagattgaatcctaaaggggatccttgcccccatgggaggccccctactagaaggacgtgaaagcagcttttgggggaaactgaggcagtggggaagacagagcagaatgagccctcaccctggctgggggtccagcacaggctgtatctgcagagggtcccagaggaacgctggagccaagagaagccctgggaaggaggggtggggaacgacatgcatgtgagggatggcacactgatgtgtttatgcacctgtacacaggagcgcatggccatggctttggaaaggagaatggaaaaatagaagaaggtcggccgggcttggtggcttaagcctgtaaccccagcactttgggaggccgaggtgggcggatcacctgaggtcaggagttcgggaccagcctggcaaacaccccatctctactaagcgaaaacccatctctactaaaattacaaaaattagctgggcatggttgcgcatgcctgtaatcccagctactttggaggctgaggtggggagaattgcttgaacctgggaggtggaggttgcagtgagccaaggtcgcgacactgcactccagcctgggtgacagagtgagactccatctcaacagaaggaaaaaaaaggaaaataggagaaggtggaaatgggtgaagagagaagtcccctcactagctgcatgagaaatctatcttactgtggttctccatgggcagcaggaccatttttcagaatcaagagggaggacagtgtgagaaggcgatgatccaaagaagacagagaggtcagccccacccgatccctcaaatgggctcttggaggcacccccaggggcagcccatttctcaaagtccagaaaattagggtcccagaagggggcagcagcaggctgggagttaggagggagagcagggtgccggccctgccaccaagttgagagctggaggggaggtggggagagaacatcacagagcagccagccctggttcactcctggcagtttcttctcaagctccttccctaggagcatggtggcacgtgcctgtggtctcagctacttgggaggctgaggcgggaggatcgccagagcccaggagtttgaggctgcagtgagctatgagggtgcctctgtgctccatcctaggcaacagagtgagacgctgtttaaaaaggaaaaaatccttccctagagctagtatcctaaagctgcagagctagcccagacctcattggtttccttgtccttggggtgcttttcctgaatctttgggggtgaagggagtgttgctcccagtccagaggcctgattctgttcggactgggttctcaagacacgaccaggttctcaagacacgagtccccttgttcctccccattaaagggggtttgtcagaagcaagaacagcccctctccccagtcacagcctgaagggaggccccgagagcttcctccttccccccacctgctccttaccttctctgccctgctttttagaactgcagttcattgttttaagggattgggggagggagcctggggacacaaaccttttatacaatacaaagctttgctttttttttttttttcttccttttccctttctcggttctcttctctcctctgaatggctgaagacccctctgccgagggaggttggggattgtgggacaaggtcccttggtgctgatggcctgaaggggcctgagctgtgggcagatgcagttttctgtgggcttggggaacctctcacgttgctgtgtcctggtgagcagcccgaccaataaacctgcttttct

SEQ ID NO: 110 - DNA, 5486 bp, Homo sapiens
agctgtgtgtgtcattgacatgtcctctttcacaaagtttgagataacatccactggggatcaggcattagaagttctacagtacctcttctccaatgacctggatgtgcctgtgggccacattgtgcatactggcatgctcaacgagggtggagggtatgaaaatgactgcagcatagcacgactgaacaagcgcagtttcttcatgatctctccaaccgaccagcaggtccactgttgggcctggcttaagaaacacatgccgaaagacagcaacctgctcctggaggacgtcacctggaagtacacagccctcaatctgattggccctcgagctgtggatgtgctgtctgagttgtcctatgcccctatgactccagaccacttcccaagcctcttttgcaaggagatgagtgtgggctatgcaaatgggatccgggtgatgagcatgacgcacacaggagagccaggattcatgctctacatccccatagagtacgccctgcatgtatacaatgaagtgatgagtgttggccagaaatacggaatccggaatgctgggtattacgctcttcgcagtctccgaattgagaagttttttgccttctggggtcaggatataaataacctcaccacgcccctggaatgtggacgagagtctcgggtgaaattagagaagggcatggatttcattggtcgcgacgccctcctgcagcagaagcagaatggagtgtataaacgcctcaccatgttcatcctggacgaccatgattcagacctagacctttggccttggtggggagagcccatttaccggaatgggcagtatgttggcaagaccaccagcagtgcctacagctacagcctggagcgccacgtttgcctgggctttgtgcacaatttttctgaggacacgggggaagagcaagtggtgacagcagatttcatcaaccggggagagtatgagattgacatcgcgggataccgcttccaggccaaggccaagctctaccctgtcgcctccctcttcacccagaagcgccgaaaggatgacatggagctgagtgacttacatgggaagtgatgccaccagggcagcctcacctcctccccatcatcttgtcctagagtgggcgtcaccttggagcttctcttccttccgcctctgttcctcttctggagcctttgcctcccatctcttatctccttgatataattttgaacttgacctactttaaacttttttgctctgcagccttccttgcccttccacctcctcctcctaatattcactctgggctcttcttcccttcccacccctcactcagcttctcgtggtggcaggaggtatgtctgacaggacagaagcaagctccactgtggacatgagtgatggtgacagctgctttcaaattctgcatctcaaggcagggcaagccggggtggtgcaggtctcagggcacgagtccctctcccttgggttccattttcttggagcagcctattagttctggtggggttgccgtgtgtcggatgcagccctgaggggcagctcgtgcctgcagcccggcagctcgttctcctgttctgctgtgctgtgggctggcactcgatacctctggcaagaggatgattatctacctcactgataagaggcatcgcatggacgttctctggtctgtagtggagacaagcagttaacctagcaccatcctcatcctccctgcagaagccattagcagacctttgggccagggcagcctccctataattttcttcatctcttgctaatctctataataaggttgctttttctttcttagttgagtaaacaagtaagccacagtgtttgaaagggaaaaaccatattgccttgtgtgttgcttttcccagtcaaaagggtctgaccttagaaagtccccaccagtgatgctgagtgttctgctatggaaacaatgctgcttttctctcagctgtccaaagttcagccgttcctccttccccttctcccagtgcgtttgactttgtcaggtcagcctcacttgtccctttcacagttggcccataaagtcatgtttctctccctttagaatagggaggggaagggatcaggtgtgttgtcctgggcctttcaaccttgcgggctgtgctgagttccagagagctgccggaattccaggtttgactctccagcacagagcagagctacacagaggtgacccacgttagtccactgagagttctgagtccaaagggtgtacgttgcataaggctagagaccgcttttcctcctttccccccaggctctttgtttccctccacccacccttccatatcctctggagcaggagacaatgtgggtgcccagaagtgccctgcgctttcaggcagtgtctctgttttcccaaggtgaaacttagatatcatggactgttgtccagcctcaatgcttcattttccccttgcatatcaactgccctaatctgactttttttaagtgcaaataaactgctataagacattttggttagtaaaactctagcctttggcgtgttggtatcttggaagcattagctctgataggtctataagtgtattaagggacatccttccatttcattagagcagcttaaaatgctcaggtgtctgccttctctggtgtttctttgggatctctgtttacccacttacgctggctccttctagacatttcttgccacttccccaactagaccactcctagtgattactgactttagtgcctaaacctttttggaaggttctggttggcttgttagaggagcatatgattagaattctgtttgggggtctagttgtcttggagcaagtatgtacttaactagccgagagatgctgcctctaggcagagaggaggagaggtgttgccggctggagggccaaccagtgaacaccagctgtgaaggccttgggagaggaggaacaggcccttgggcagatgcaggcattaccagcagggagcagacttacctccgaagatggagacaggtgactgagagctgcaggcctcctctgctcttccaaacacgtagcatttgcacccctccaaagccatctttgtaaaggaaaacgtatttgtaattgaatccagaagaatttagttacacatagacataactcttcaaccttaactatggcaatacatttgtgctttaactgttacatagcagtatcaccacttaccaggatccaaatcgaaataataaaagctgtctccatagtttaaaatcgaatagtgccatcatcacagtatattagtcaaatagaagcttcatcagaaatgtatcccacatagagttttaagacttggattctcttctgcccttgttaatctccaactaattactacagattgacacgtttttaattagctgtcctttgtaagaagtcaggaaatctgatgctgtgtccaaaattatgcactgtttgttgaagtagaaccagaaatcctgacctcctgttaaatgacatcagtttccccctctgagcaacagactgcttgtcttgctaggagaggaggatggggggctgagcactcaggctgtccattgaaaccccttgtccatgaatagggtcatactcctaagactgatggggtgttgatcttctaggacatcacttgtttattcagtgccccaaacacagatttctcttctagcactttagagttgatccttgaagtctctcctggttcattcaaatacaagctgtgtgagtctggtggttttctgtgattggtctaatgtgagctctttgaacagacagatctgacagtgaatgactctcccctgcttctggcataactgctttgcctctgtctagtgtccaagcatcttagctgttcaagaggagagggcagcataacttcctgaccaccggtgtcagatatcagagcattctggactcctgagaggcagtggcctcttgagtgaacaggggaggccagtagatgccccagatccagagccgtggctgcaaatccagcaggaataaggagggacaaccacagcctcctcatccatgtgtcatttccaagggtttgccttgtgtctcagctcattctgggcagcacgtttgtcttctgtccctagagatttgaaggattttggactcttgtgaatgggtgactggacttggctttacagagttgggtgcttttttctctctgcaattacctgtcatagcattttgtgctcaccacgaaggatggtctctgccttctcttgtcggtgtatgccatctgaacctaggaacacaaagtatattggcctcaaacggagacccagggttgccagttttccgtgggccttcccctcccttgaaatgtctttaattacctccccttcatcgtcaggccacgtgtgacttctgttcttagcactgccagggtcattgacttccatctaagcttgcatcaggaagatgttccttctgtgatcattggtactgaagccagaaaagctctcattcaggaactctgaagagcaaaaagggacaaacactaactgctgagctgggccatttgatctcctttcaccttgcattgctgtcacagcaccttgtatgatggcaggacaggctccagcagagagaactgcacagtgaccactgtatttttcacgctcttccagggatccctgtcccccgacattgaagagatctcattcaggccagagacacagagaccacatagcccagtgattaaaccccggtttcactctggccccaggagtggagcctggccactcctgtttggttctcactgggaggcccactggccttggatcatctcctcatgcacacccggagttttacctgcttgcttgctttcctggactgctgtttgcaagaaagtaactaaaacatgaaaagtaaacctccagcttccacagtatattacctgccgttgcatgcatttgaaagttagcctcctcccttgccaccgtcttggtggcagtagcgatgcaagaatgatgggagctttccgagagcgttcagtgtttcactgaagacaggacccatagccttcatttctggctctgtgtctcctctggcatatggacacatttcctggcatttgcctgagtctacaccactttttgagaacctgaaatagaagggaatcttctgtggcccacagtctccatattggcactagaagactggcctggcggaggaatttgcgttggcttgctttcaggggttagctacaagattcagctttatatctctgttgcttcttggccagtgtagtcaataagggtcttctttaacatctaagatagaggtttggttggccgggcgtggtcgcttactcctgtaatcccagcactttgggaggcccagtgaggtgggagaattgcttgaacccaggaggcagaggttgcagtgagctgagattgcaccactgcactccagcctgggtaacagagtgagactcttgtctc

SEQ ID NO: 111 - DNA, 5332 bp, Homo sapiens
ggccgctcaaccatcacagaagatcacagccaccaaaatccccaaaagcctccctaccaagccttcggccccttctacttcaattgtgcccatcaaaagcccccatcctacccagaaaacagctccatcttcatttacaaagtcagccctacccactcagaagcaagtgccacctacttcccgtccagttcctgccagagtctcccgtcccgcagagaagcccatccagaggaacccgggaatgcccaggcccccaccgcccagcacccggcccctacctcctaccaccagctcctctaaaaaacccattcccacactagctcggactgaggccaagataaccagccatgccagtaagccggcctctgcccgcaccagcacccacaaacctcccccatttactgctttatcctcatctcctgcccctactcctggttctaccaggagtactcggccaccagccacgatggtacctccaacttcgggcaccagcactcccagaacagcacctgccgtccccactcctggctcagctcccactggaagcaagaagcccattggatcggaagcctcaaagaaagccggacccaagagcagcccccggaagcctgtccccctcagacctgggaaggcagccagggatgtccccttgagcgatctgacaaccaggcctagccccagacagccccagcccagtcagcagaccaccccggccctggtattggccccggcgcaattcctgtcctccagcccccggcccacgagcagtggctattcgatcttccacctggcaggatctacgcctttccctctgctgatggggcctccgggacccaagggagactgtggcttgccgggtccccctgggctacctgggctacctggaatccctggtgcacgtgggcctcggggtcctcctgggccttatggaaatccaggtctccccggccctcctggagccaaaggtgacatgggcttgcctgggctctccgggaatccaggacctccgggacgaaagggacacaagggctatcctggaccggcagggcaccccggagaacaggggcagccaggacctgagggcagcccaggggccaaaggttaccctggcaggcaggggttacctggaccggtaggagatcccggccccaaaggcagcaggggctacattgggctcccagggctcttcggcctgccagggtctgatggagaacgaggcctgcctggtgttcctggcaagaggggcaagatgggtatgccggggtttcctggagtctttggggaaagaggccctcctggactggatggaaatcctggagaactgggcctgccaggcccccctggagtccccggcctcattggtgacttaggagtgttgggtccgattggctacccgggacccaagggcatgaagggactgatgggcagcgtgggggagcccggactgaaagggtgaacaaggggttccaggtgtgtcaggagatcccggattccaaggagacaaggggagccaggggttgccagggttccccggtgcacgggggaagccagggcctctgggcaaagtcggagacaaaggatccattgggtttcccgggccccctggacccgagggattcccaggagacatcggcccccctggcgacaatggcccagaaggcatgaagggtaagcctggagcccgaggcctgccgggaccccgtgggcagctggggcccgagggagatgagggacccatggggccgccaggggcccctggcttggagggtcagcctggcaggaaggggtttcctgggaggcccggcctggatggcgtgaagggggaaccaggggatcctggtcggccggggcctgtgggagagcagggatttatgggattcattggtctggtcggggagccaggaatcgtgggagaaaagggtgatcgtggcatgatgggacccccaggcgtgcctggacccaaggggtcgatggtaaggaggtcatcctggaatgccaggtggtatggggacccctggagagcctggaccccagggtcctccaggatctcgaggcccaccaggcatgaggggagcaaagggacgtcggggcccccgaggaccggacggaccagctggggagcaagggtccaggggcctgaagggccctccaggaccccagggcagaccgggccggcctggacagcagggtgtggctggtgagcgaggccacttgggctcgagaggctttcctggcatcccgggtccctcaggccccccaggcaccaagggcctcccaggagaaccgggccctcagggaccccaggggccaattgggcctccaggagagatgggacccaaggggccgcctggtgcagtgggagaaccgggccttcctggggaagccgggatgaagggtgaccttggacccctgggcactcctggggagcagggcctcattgggcaacggggagagccaggccttgagggtgacagtggccccatgggacctgatgggctgaagggggacaggggagacccagggcctgatggagaacatggcgagaaaggccaggaagggctgatgggtgaggacgggccccccggcccccctggcgtcactggtgtccggggtcctgaaggaaaatcagggaagcaaggcgagaagggccgcactggagccaagggtgccaagggctaccaaggacagctgggtgagatgggcgtccctggagaccctggaccccctggcactccaggccctaaagggtcccggggcagcctgggaccaacgggtgctccgggacgcatgggggcccaaggagaaccgggactggctggttatgatggacacaaaggcattgtgggaccccttggacctcctggaccaaaaggcgaaaagggggagcagggcgaggacggcaaggctgaggggccccctgggccacctggagatcggggccctgtgggtgatcgaggagaccgcggggaaccgggagaccctgggtaccctggacaggagggtgtgcaaggcctccgtggaaagccaggccagcagggccaacccgggcatccgggaccccgggggtggccgggacccaaaggatcgaaaggcgcagagggaccaaagggaaagcaaggcaaggcaggggccccaggccggaggggggtccagggcctgcaggggctgccagggccccggggcgtggtggggagacagggcctcgagggcatcgctggaccagatgggcttcctggcagggacgggcaagcaggacagcagggggagcagggagacgatggggaccctggccccatgggccctgctgggaagagaggaaatccaggtgtggccggcttacctggagcacagggacccccaggattcaagggtgagagtgggttacccggacagctgggtccccctggcaagcgaggaacagagggcagaacggggctccctggaaaccagggggagcctgggtccaaaggccagccgggcgactctggcgagatgggcttcccaggaatggcaggtctcttcggacccaagggcccgcctggagacattggcttcaaaggcatccagggccctcgggggccacctggcttgatgggaaaggaaggcatcgtcgggcccctcggaatcctgggaccttcgggactcccgggtccgaagggtgacaaaggcagccgtggggactggggattgcaaggtccgaggggtcctcccggccccagagggcggcccggccccccgggtcctccagggggtcctatccaattgcaacaagatgatcttggggcagctttccagacgtggatggacaccagtggagcactcaggccagagagttacagctatccagaccggctggtgctggaccagggaggagagatctttaaaaccttacactacctcagcaacctcatccagagcattaagacgcccctgggcaccaaagagaaccccgcccgggtctgcagggacctcatggactgtgagcagaagatggtggatggtacctactgggtggatccaaaccttggctgctcctctgacaccatcgaggtctcctgcaacttcactcatggtggacagacgtgtctcaagcccatcacggcctccaaggtcgagtttgccatcagccgggtccagatgaatttcctgcacctgctaagctccgaggtgacccagcacatcaccatccactgccttaacatgaccgtgtggcaggagggcactgggcagaccccagccaagcaggccgtacgcttccgggcctggaatggacagatttttgaagctgggggtcagttccggcccgaggtgtccatggatggctgcaaggtccaagatggccgctggcatcagacactcttcaccttccggacccaagacccccaacagctgcccatcatcagtgtggacaacctccctcctgcctcatcagggaagcagtaccgcctggaagttggacctgcgtgcttcctctgacctctgacctcgtggccactctaggcctcatggaggagggaagaggaagaggcaaggggagggtactgaggggcagatggctccaggagaggcagctcccctgcccaagggtccttgggcagaccccagctgttgtctgcccagtagaagtgggtgggggtaggaggggatagggtgtccttgggaacaatggatcccagcttagccccaaagaccaaccaaagagccagccagagtaagctggacctgcaacctgcctgagccccgtggcctctcagctctgcggccaccccgttccctccccagcttcctgcccaaagagccccacattcaagccaacttgagggaagggggcgtctcgtcagctggtccctgctagggagctattgatgtgcaatattagaaaggagacatgaaaaaaggagaaaaggaaagacagaagtgtatatatatattatttaaacaaacaaaaagaaggtgcgttactatttttttttcacccgggaaagaggtgagaggatgggaaggagcagccaggcgtgggaagcggcgagatcctcgggctgggggtgcccacgtttgctacctcccactgtgaaatcgctggtgctcgcaattgtctctcacagtgtatgtgatttttttaaggaaaaaaaaaaaacatccctatttaagattctgaaggtgctaccattattttgccacagactttgaagaaacttttggatgtggggcatcatccgcatctttctctctcctccaaatgacaaagtttggggaatttttgaattttcctagcatcgcccttgtgctcatcaggtaatctgctaaggaggaaaaaagaaaagaaaaaagg

SEQ ID NO: 112 - DNA, 5530 bp, Homo sapiens
caagaattacctctttaacatggaacaaccaggtcaaaatgtatatacatctttaaaattgaccagtagctactttgacttgcctaaaaacgtaccagtgcatctgctcagctgcaccgttggtgggtgcctgtttccccggcccctccctttggctaacagcacatcatggaatcacttcacaccctccttgtcggtgaccaagcatggtgatggcgcagccctttcctgtttaaacggcacgggactctctttgttgcaggccagacgggtgcagggaacaactgggcgaaagggcactacacggagggcgcggagctggtggacgcagtgctggacgtggtgcggaaggagtgcgagcactgcgactgcctgcagggcttccagctcacgcactcgctgggcggcggcacgggctcaggcatgggcacgctgctcatcagcaagatccgtgaggagttcccggaccgcatcatgaacaccttcagcgtcatgccctcgcccaaggtgtcggacacggtggtggagccctacaatgccacactgtcggtgcaccagctggtggagaatacagacgagacctactgcatcgacaacgaggcgctctatgacatctgcttccgcactctgaagctgacaacgcccacctacggggacctcaaccacctggtgtccgccaccatgagtggggtcaccacctcgctgcgcttcccgggccagctcaatgctgacctgcgcaagctggcggtgaacatggtgcccttcccgcgcctgcacttcttcatgcctggcttcgcgccgctcaccagccgcggcagccagcagtaccgggccctgaccgtgcccgagctcacccagcagatgttcgacgccaggaacatgatggccgcctgcgatccgcgccatggccgctacctgaccgtggccaccgtgttccgcgggcccatgtccatgaaggaggtggacgagcagatgctggccatccagagtaagaacagcagctacttcgtggagtggattcccaacaacgtgaaggtggccgtgtgcgacatcccgccccgcggcctgaagatggcctccaccttcatcggcaacagcacggccatccaggagctgttcaagcgcatctccgagcagttctcagccatgttccggcgcaaggccttcctgcactggttcacgggtgagggcatggatgaaatggagttcaccgaggcggagagcaacatgaacgacctggtatccgagtaccagcagtaccaggatgccaccgccaatgacggggaggaagcttttgaggatgaggaagaggagatcgatggatagtcggaatagagccgccccaactcagatcctacaacacgcaagttccttcttgaaccctggtgcctcctaccctatggccctgaatggtgcactggtttaattgtgttggtgtcggcccctcacaaatgcagccaagtcatgtaattagtcatctggaacaaagactaaaaacagcagagaattgcgggttctacccagtcagaagatcacaccatggagactttctactagaggacttgaaagagaactgaggggccacaaaataaacttcaccttccattaagtgttcaagcatgtctgcaaattaggagggagttagaaacagtctttttcatcctttgtgatgaagcctgaaattgtgccgtgttgccttatatgaatatgcagtatgggactttgaaataatgattcataataaaatactaaacgtgtgtcttcatctctctagccatgtgcataaatgacgtaagttactttgtatggttacaatggctacttgggtcactggtctctccctggggtgaactcctccccacttcagttcacgaaaacaacagaggaaagggctcttctttaaatggaggctttaaggggggcagccaaaactgttgctagctggaaggcaatgcagtacagacaaaagcccctcctccatccgcagccaccttttagactcccacaggatcttgcattttcccaagtcaggtcctgggctagggttccccaaccttgtaggggaacaaacagccccaaaaggcctccggacaaagccaggggtgctgggtgggagctggggtgccaacagccagccctgcatggaagggatgggcccttttctgctgtgacccatcacacctgatggcttctaccaccggccacacctttggagtttccaaagataaactccacggggcacgcacagtagccctgctagtgcctggtacagacctcactgttgacaatatttttgctttacttcttcctgccctcttgaagctgtgaacgtgggacttgctctagccataagaatgggcatagtgtgtcacccccgagtggaagcgtcatgtgccagtgccagccctcctgctctgcctcccacgtgggcagcccccccgatccctcctgtccacccgtccaggttcctgagtgaccatcctgggcagagcccactctgacctgtgttggacagggaataagagacagacaaagctttgtcattcgggaccacttagggttagggttccccacagtacaaccacaacaccacccttggtctgtgatcccaggccttacattgactagctgtatttattttgtgttaagccccagccttgggcagatggaaagttcatcactaaacacagcagcatggcttgaggtgatcacagatctttttgcagaaatctgaactattctgagaccacagtaaaaataaatcttaccagctcaccacccacatctgtcctgaaaacatgttctgtgtgaccgtggaaagatctatgcatgagcaggccccacaagatggtggcacagggagccacggttgctcctagcacagagggccacttgcacaggttgagcagccatccagggcccagagcttaaggttgctcacctcaccagaaacatgggtgttgtcggtgctatctggctttgtcactcttactgtatcaagcctgacagacagtgggccccactctcgtcccccgggaggtctcacagccaaggcctgtgagagggcagcccacgctggctccatgccttgcagtggttggataaggagtagagagcgtctcctaatcgtctactgcctgtatggtaaaaagcacacccagcaccctcacaactgtgtgagcctcagcctggaaacaatgcttcattgggcacctcccaaaaacaccctatgaggaaaggaagtggccagtgtggcaatgcctgcaggtgcaaaggtccagcagggggcgcctgttctcctggcatgctgagctgtggagtccaaacagctgcttccacggcctgccggggacaggtgggtatctcaggctgctgggaagtagccatgggtggagcatgcatggcctggggccatggcagggatgccactagattgtgttaattctaaagccactgttccgacaacatcaacaccacacaaggcaagctggaataatgctaaaacagactgctaaaaatgtaaatagttaaaaatgccagtgtctcctccatgtccaaataacagcaattgatagaagacatagcaaatcttcctcatgccatcttttttaaggaattttgatataggtttgcaacactacagactcacttttctggaagcacataaccaataactccctttcaatagacaataggagcagcttaccagtcagaccactcctgagatgtccccagagagccagggcccaggggactccagcttagttccactgttccttctctaaaatccaggtgacggctcaggtcagcctgccaggcccgctacagttatacgttaacttctatacccagaaggtgtggccaacatctggccatgactggcctcttgaggacctgcactggggtggttatcacagattcaggccatgactaacccctcaggacccatgtactttatatccagagctcagtgcatctttacaggacacataactctagaaggttccaacctcctgtgggagctaatgagaaccagcgaggctgagattttgaaggattctcctctaaaaagcaagaaaatttaatttcttgccattatgttttctaaaaatatccagagcataaatagggaccctatgtgtgttcagaaaagtacagtgttgacattttattttttatgtaaagaagccatatttacataatacattcatatttttaagtatgttacagctcctgtagaaaaccattccattaagacagcaacaagtgatctggattcaatctttaaaatattaagtcaaattaaaatgttcttatcaagactccaatttaatttcacagcccatctgcacaggggaactgaggagaaacaggaatgaagagtgggcgacaaagagaaagcatcccttcccacacgccaagagtccagtgcaacgatccctgccacacggtcagccgaccccacttggtgccacagggtccagcctcggccactctgggctcaacctttccagcacgtctgggagcccaatgaggctatgggacagtgtgcatttccctcaaggcctccggaaagtcacctgccacccactgtgacctctgaggctgaaaggactaaggactcctttccccatcatttcagctgggccagtggctggctaaaatcagcgcagcattcccattcttctgaaagccacagctgaaataatgcaccagctgaaaccacagtggacagactgagatggcctccctctgggcctctagttggcaactttctcacccgggggctcctctttctccttttcccgctccttgttccagtccttaaggccttctggaagtgaggtgtcctcatccaagctgccagtgccttccacaaattcttcataggtagatttttccgcaaatggtctggggcccaaaagttcaaccatatcattcttatctaatacttctttttctaacaacagaagagcaacctgaaatatgaacaattttcattaaatacagttactcagcaaagtctattcagaaatattaattttttatttacaggtgaccccattccaaaaaaggatttaagaccaatgaaaaagatgtctcatacataaggttgcatagttttagagtaagatgtgcaaaatatcaaagcaaccaatgtccatctgtaagggatacatttccatactagacatatttccacacatctgcacaatgaatgctgaccatctataatgaggaggaagctggccgggcgcggtagctcgcgcctgtaatcctagcacttcgggaggccgaggcgggtggatcacaaggtcaagaccatcctggccaacagggtgaaaccgtgtctctactaaaaatgcaaaaaaatagctgggcatggtggtgtgcgcctgtagtcccagctacttgggaggctgaggcaggaggatcacttgaacccgggaggcggaggttgcagtgagccaagattgtgccactgcactccagcctgggcgacagagcgagactccttctcaaaacaaac

SEQ ID NO: 113 - DNA, 5409 bp, Homo sapiens
gcagggcggtcacggcggcctgcccagggcgcagcggggtcgacctttgtgcggggcgggtccctggcagcctcggcccggactcgccgccaacgaggagccgagcgccctggagaacgcgtcggggctgagccggggtccagcagccgccgctatggacatcccgccgctggccggcaagatcgcggcgctgtcgctgagcgccctcccggtgtcctacgcgctcaaccacgtctcggcgctctcgcaccccctgtgggtggcattgatgagcgccctaatcctgggtctgcttttcgtggcggtctacagcttgtcccatggcgaggtctcctatgacccactctatgctgtcttcgctgtcttcgccttcacctcggttgtggacctcatcatcgctcttcaggaagacagctatgtggtgggcttcatggagttctacaccaaggaggtacttgggggacgaccagggagccccctaccgcactgcccgtctgagtctcccacctgcccccacagggagagccatacctgcgcacagcgcacggagtcttcatctgctactgggatggcactgttcactacctcctctacctggccatggccggcgccatctgcagaaggaagagataccggaattttggactctactggctgggttccttcgccatgagcatcctggtgttccttacaggaaacattcttggtgcaagaggaacaaagaaagggactcctgcagcgtccggctgacctggcccttgtcatatatctcatccttgctggcttcttcactctgttccggggcctggtggtgcttgattgccccacagatgcctgctttgtctatatctaccagtatgagccatacctgcgggaccctgtggcctaccctaaggtgcagatgctgatgtacatgttttatgtcctgcctttctgcggcctggctgcctatgctctcaccttccctggttgctcctggcttccagactgggccttggtgtttgctggaggcatcggccaggcagacgccgggattgcgccgcctgcagggacctgcccagtcttaaccgggtgtgcggggagcgcagtccgggtgcgtaggggccgctcggcgggggccgcgcgggcaagatggtgtgcgctcgggcggccctcggtcccggcgcgctctgggccgcggcctggggcgtcctgctgctcacagcccctgcgggggcgcagcgtggccggaagaaggtcgtgcacgtgctggagggtgagtcgggctcggtagtggtacagacagcgcctgggcaggtggtaagccaccgtggtggcaccatcgtcttgccctgccgctaccactatgaggcagccgcccacggtcacgacggcgtccggctcaagtggacaaaggtggtggacccgctggccttcaccgacgtcttcgtggcactaggcccccagcaccgggcattcggcagctaccgtgggcgggctgagctgcagggcgacgggcctggggatgcctccctggtcctccgcaacgtcacgctgcaagactacgggcgctatgagtgcgaagtcaccaatgagctggaagatgacgctggcatggtcaagctggacctggaaggcgtggtctttccctaccacccccgtggaggccgatacaagctgaccttcgcggaggcgcagcgcgcgtgcgccgagcaggacggcatcctggcatctgcagaacagctgcacgcggcctggcgcgacggcctggactggtgcaacgcgggctggttgcgcgacggctcagtgcaataccccgtgaaccggccccgggagccctgcggcggcctgggggggaccgggagtgcagggggcggcggtgatgccaacgggggcctgcgcaactacgggtatcgccataacgccgaggaacgctacgacgccttctgcttcacgtccaacctgccggggcgcgtgttcttcctgaagccgctgcgacctgtacccttctccggagctgcgcgcgcgtgtgctgcgcgtggcgcggccgtggccaaggtggggcagctgttcgccgcgtggaagctgcagctgctagaccgctgcaccgcgggttggctggccgatggcagtgcgcgctaccccatcgtgaacccgcgagcgcgctgcggaggccgcaggcctggtgtgcgcagcctcggcttcccggacgccacccgacggctcttcggcgtctactgctaccgcgctccaggagcaccggacccggcacctggcggctggggctggggctgggcgggcggcggcggctgggcagggggcgcgcgcgatcctgctgcctggacccctctgcacgtctaggctgggagtaggcggacagccagggcgcttgaccactggtctagagccctgtggtcccctggagcctggccacgcccttgaagccctggacactggccacattccctgtggtcccttacaaactaactgtgcccctggggtccctgaagactggctagtcctggcagaacagtactttggagttccctggagcctggccagccctcacctcttctggatagaggattcccccaactccccaactttctccatgagggtcacgccccctgaggacctcaggaggccagcagaacccgcaggctcctgaagactggccacgcctcctgagaccacttggaaacagaccaactgcccccgtggtcgcctggtggctggacccccgggattgactagagaccggccgtacaccttctgcatctcactggagactgaacactagtcccttgcggtcacgtgggacactgggcgcctcctcctccccctcctcctcacctggagagactacaggaacttcagggtcactccccgtggtcacatggaggttgtgggccgaggcgcttattttcccttatggtgacctgagtcctggagactcccattctccccctctccctgagagtcccctgcagtttctgggtaacagggcacacccctctagtttcatgggcgagcacccccatctgccacctcagactgacacacagccagctggctcacttactgggggccacgtcccacccctcagatatttctttgaagggagagcaaacccaccctgtcctctgacgtccctttcccaactgtcaccaaacagaccatcttcccaggcctggggaccggtaagatccatgtcactagttatgcagagcagttgccttgggtcccactgtcaccaaggcaaccagtcctgctgctacctgtcacctagagtcacacaccccttccctcatcaggcacacccatgaagacagtgcctccctcctccagctgtaaccatggataccacacatttctcatctcattggcccccaccccagagacctccacctcaacttctggctgtccctaccctgactcaccgccatggagatcaccctccccgaagctgtcgccagggtgacccaacatccagttctccggctctcaccatggaaacaaactgtccctgtccccaggcccactccagttccagaccaccctccatgctccacccccaggcggtttggaccccaccactgttgccatggtgaccaaactctggagtccgaggtaacagaacacctgtccccctaggcttttccttgtggacaacggggccctgttcaccaagctgttgccatagagactgtcaacgttgtcctcatgacaaccagacttccagttctcaggaacttctcattgtgggccagaagtcctgggtgcctcctactagggctaccctactgcaccccatcaggggcctgatggctgccccttccccagacagggctggacttctggagctgctaagccaccctccgtttgcacgttaactctatgccggatagcagctgtgcacgagacaatcttgcaacacccgggcatgtttgtcgtcgtcctacaaatgaggaaaccgagcctatggcgtgccctggtctgttgagatatgcaagcactgagctcctcttttgtcctctgagaccccatctccattctcacccagttcctctctccttccctgacccccacccacatttccctccttagagatccaggagggatggaatgttctttaaaattcaacacccaccaggctctaagcggcgatctgtgctaagaggtcaggacccagccgaagtcctcggcgttgacaggcagctggggggacatgatccatggacaaggccatcccggccgtgggagaccccagtcccgaagtcttgcctgcaggagtactggggtccccctggggccctctttactgtcacgtcatctctaggaaacctatctctgagttttgggaccaggtcggtttgggtttgaattctgcctcttcttgctcactgtgtgaccaagtgacaaactccttctgaacctgtgttctcccactgtaccagggctgttctgtggtccccgtgagtgccaagcatacagtaggggctcaataaatccttgtttcttttgatgaatgagaaaatgaggcagccagtgggtaattcctgtataaatgcactttggtagataagatgttacaagcttggggggcttggggttttttttgttttgtttttttgagatggagtcctgccctgtcgcccaggctggagtgcagtcgtgcaatcttggctcactgcaacctctgcctcccgggttcaagtgattctcctgcctcagcctcccgagtagctgggattacaggtgcctgccaccacacccggctaatttttgtatttttagtagagacagggtttcaccatgttggccaggctggtcttgaactcctgacctcaggtgatctacccacctcggcctcccaaagtgttggggttacaggtgtgagccactgcgcctggccgggcttgatttttattctctttggaagtggggtccttcattcctcccccacctccccaatctcttgctcctctttcttcccccatcctgtgcccactgtctccctttagccacccaccatgggtctgctccttgtcaactctgtcctgactgggtcattgacaagatccagggcatgaaattcgggaaactggaaggggggttcctgtaccaggaagggagagacattacaaactttccctgacatgaatatgtgggctgagggcaggggctgaggaagcactggaagtttctaggatacaacaaagcatgaagagaaaaaatagtgtaaggtcctgaccgtgcacagtggatcatgcctataatcccagcactttaagagaccaaggtgggaggattgcttgagccagaaggtcgaggctgcagtgagccatgattgtaccactgcactccagcttgggcgacggagtgagaccctgtctcaaaaaataaaaataagtaaatctcctcttcctc

SEQ ID NO: 114 - DNA, 5974 bp, Homo sapiens
cggacattcgtattcgggtggccatcccactggactacgagaccgtggaccgctacgactttgatctctttgccaatgagagtgtgcctgaccatgtgggctatgccaaggtgaagatcactctcatcaatgaaaatgacaaccggcccatcttcagccagccactgtacaacatcagcctgtacgagaacgtcaccgtggggacctctgtgctgacagtcctggcaactgacaatgatgcaggcacctttggggaagtcaactacttcttcagtgatgaccctgacaggttctcgctggacaaggacacgggactcatcatgctgattgccaggctggactatgagctcatccagcgcttcaccctgacgatcattgcccgggacgggggcggcgaggagaccacaggccgggtcaggatcaatgtgttggatgtcaacgacaacgtgcccaccttccagaaggatgcctacgtgggtgctctgcgggagaacgagccttctgtcacacagctggtgcggctccgggcaacagatgaagactcccctcccaacaaccagatcacctacagcattgtcagtgcatctgcctttggcagctacttcgacatcagcctgtacgagggctatggagtgatcagcgtcagtcgccccctggattatgaacagatatccaatgggctgatttatctgacggtcatggccatggatgctggcaacccccctctcaacagcaccgtccctgtcaccatcgaggtgtttgatgagaatgacaaccctcccaccttcagcaagcccgcctacttcgtctccgtggtggagaacatcatggcaggagccacggtgctgttcctgaatgccacagacctggaccgctcccgggagtacggccaggagtccatcatctactccttggaaggctccacccagtttcggatcaatgcccgctcaggggaaatcaccaccacgtctctgcttgaccgagagaccaagtctgaatacatcctcatcgttcgcgcagtggacgggggtgtgggccacaaccagaaaactggcatcgccaccgtaaacatcaccctcctggacatcaacgacaaccaccccacgtggaaggacgcaccctactacatcaacctggtggagatgacccctccagactctgacgtgaccacggtggtggctgttgacccagacctgggggagaatggcaccctggtgtacagcatccagccacccaacaagttctacagcctcaacagcaccacgggcaagatccgcaccacccacgccatgctggaccgggagaaccccgacccccatgaggccgagctgatgcgcaaaatcgtcgtctctgttactgactgtggcaggccccctctgaaagccaccagcagtgccacagtgtttgtgaacctcttggatctcaatgacaatgaccccacctttcagaacctgccttttgtggccgaggtgcttgaaggcatcccggcgggggtctccatctaccaagtggtggccatcgacctcgatgagggcctgaacggcctggtgtcctaccgcatgccggtgggcatgccccgcatggacttcctcatcaacagcagcagcggcgtggtggtcaccaccaccgagctggaccgcgagcgcatcgcggagtaccagctgcgggtggtggccagtgatgcaggcacgcccaccaagagctccaccagcacgctcaccatccatgtgctggatgtgaacgacgagacgcccaccttcttcccggccgtgtacaatgtgtctgtgtccgaggacgtgccacgcgagttccgggtggtctggctgaactgcacggacaacgacgtgggcctcaatgcagagctcagctacttcatcacaggtggcaacgtggatgggaagttcagcgtgggttaccgcgatgccgttgtgagaaccgtggtgggcctggaccgggagaccacagccgcctacatgctcatcctggaggccatcgacaacggccctgtagggaagcgacacacgggcacagccaccgtgttcgtcactgtcctggatgtgaatgacaaccggcccatctttctgcagagcagctatgaggccagcgtccctgaggacatccctgaaggccacagcatcttgcaggaggaagacttggcctccccctgcatatctcccgccccacccagaagggcctttcagagtagcggggagaaagagacgtcacaatttcccggaaaggagttgagaagagagccagggcccagcaaggcccagaacagagctgctttcacagagcccttggccgaggctcccctcttgggaagtaaacaggcacaagaagaaagggctcctttgcccagggagcaggcgcaacagctccaaggctcagagggagagaagggaggaccctgaaaacaatttgggtgtgcacccacacctctgcccagaggcctcagttgctgggtggggagggaggcccggagtgaatgagtctctttaccaactatggggtttccgactcggaggctgagccaaacagggaatctgggcctgcccactggggcaggctcccgggcttgggagggacagaagcgtgggaggctggcaatgctcccctccctgcatcgggaccaggaggcgggcaggaaagggctggggagcagggagctgactcccagaaacacagagagcccagaaagccctgaggatttgcgagagtgtggtggctagctccagaaggaggaagtagagggttctctcgatcagggcctcagcttgtgaggacttggagcatacccccctggcctggtgcctgaaacccaattgagagccctccccctcctggacttttccttcttcaggcctcagggcagcctcaacccccaccccaacctccaggaagacagtgcctagtggccagcagggcctgctggtgaggtggatggctacaggctgaatccagcctaggatttgcagggaggccccaggggaagcaaaccaggaagaggttactgagcaggaagggaggaaggaacaaaacccttagggaggaggcctgccccactttctaaacccaaagacttggtttctatttacacaatactactcttactgaaatcctagagccagcgagttaatatagggcagccctgagttctcccatttctcagggagaaatgcagcgtctcaggatgacttctccaaggtcctcttggtaagtttcttgtgaagccggactcactttttgagatcagattgacttggaaggaagggacagtgggcttctccaatagagcctgcttggagagaaatctttctagagtcatctgagggaagatgaggctctgtgttatgccagcttccaccaagactcctgcctcagagggtggggacacacccaggctgggccacgcttcactctgtacacagaagcctcatacttctgtgcacagaactggggagtcaaagtgaggggctggacaatgtctggctctctgcaagctcccaagctggtaggaaagagaagacatagacaaaaaggacccatgctgccaagagaatgttccttttcctccccaagagaggtaggagacagtaggggcggctccaggcaggagggcttcacagagtgggtgtgtgtgaagcataagccacagttagtgggtgacaggtctttcagttttcctggagttttggatcaagatgaggctagaaagattaattggagccagctcccagagggcactgcacactgcgctgaggagctttggctatatccatttggcattagggagccagtgaaggttttggagctggggagtggcaagccagagctcactccttggggagacgtggctggctgcactgtgggtcacagcaggatgggggtggggcagctttgtggtgggatcctggccagctgactgggacaggagctgggcagcccaggtcctccctctgcccacccttcaaatttgggacctgaccaaagtgtttaaccctcgcgttgtgaggagaggtcaagggtttgggattctgagaagcccatcctggggtgggactgctttgacgggtcatcagcaaagcactcaccaaaaccacagatagcatccctagtgtgggcaggacttgggaccccacagctgtcctggagaggtccagaccatcccaccctcggggaggctgccgctttccctgggtgaggtgtggagctgctgtgagctgtcctcctccgagtccaggtggcatcacctccagctgctggaaatgccctgcctcttgccactctgtcacagcacccgccctggcctctgaagggagcctcctcgatcatcttcaatcccttcctgattgatcccaacgtgggtgccctgaagaggggccaccaagacggctgccaagaccatgcttggagagccctgtttgctcctcctcccagctggcacccaggcatctgttccaccaggagggaggcagctgctcccacagggcaccaggcagatgctggcagcacccgggaaacccaaggaagagagccccgaggttttgccccagcactgggccagcacagatgccaggacagtgtcttggccccggtgtaggctgagcatttcacttgactaaagggaacctttgccatttggcaacttctccatgctgggctttggcacctggagggcaaggcttctgtggcgagcgagggtgctgcttctaggaggtggttacgagccccaggttgtaccctgtggagcctcaggccaaaggcccagatgaccacgagtgcacatctcttgaccagaagtctttcatcaagcagcagcgagggggtctgcagagaggaaggtgctcttctgaggatcatctttgggaaagggcgctggcctgggcatgcaaggagcttcggggggtgagtgtgtgtcccagactgcttgggccactgtcttcctgcagcctgcagcaccggtctctgaagcaggaggatctacaggtagacctagggggatgtgggggcatgtttgtggacaccccattacatcttggtagattccatgtagtcacagtggctgcggttgtcctcggggcccggcaggggctgtcgagggacggtgggccggccatggcggaagctgtgcagggagaggcgcaaggagcccaggcgcttccagagccggagctggggctcactggggctcccagggtggtggggcatgcactcgtgagccctgcggcggctcgggtccagcgcggccggcttgcagagcgtcatgaacagcagacaggtggccagcaggaggaagatgcaggccagggcgatgagcatggggagggggtcagttgcctctgcaagggtcccgggagtgacgggagctgagagaaaggcgagggggctgatggctggggagctggcgaggctggggccctctgtgctcatggctcctgcaacagcaacaagacagaagctcaaaggcagatcagctggacccagggcagcgggtatagggaagacttacctagggaatgtggatgggggcaaggcactgttaaactggacagcatcatggccacatcacaggttaagacagcaaggtccagagacatcacaagtctaagtgtacacacagctgagcagtgatggagctgggcccaagctcaggccctcttcctgttccaccctgtgcccatctgccatgcagacaagagggcggtggcctgtccgcattttcaaatcaatcctcatgaatcatcacagggtcttaggcctggaaacttaagaccaactctgtcaataacttgctctgtggccaggaacgagttatggatggtaagaggccgcagctgccagggtccctagcagtaatctaataccaaagctgcaaactgggggcccacgggtgtgtttagttgggtccttgccatgtttttatcaatgtaattatgaatattttcaaaataataacagatttcacaaaaat

SEQ ID NO: 115 - DNA, 5421 bp, Homo sapiens
ccgaggagccgtcgccgccatttcaagaccgtactaggtagatggtcaattagagttcccagggtttgaagcctgtaactgctgccgccgctcaagccctccagagcattgctacggctgctgcccttgtactactacctccaaatacgttcttgctggtagtggcggcagcaggaccaattacctcttttttgctctccctcgagaagctccagatggcgtcttccgtgggcaacgtggccgacagcacagggttagctgagttggcacatcgagaatatcaggcaggagattttgaggcagctgagagacactgcatgcagctctggagacaagagccagacaatactggtgtgcttttattactttcatctatacacttccagtgtcgaaggctggacagatctgctcactttagcactctggcaattaaacagaacccccttctggcagaagcttattcgaatttggggaatgtgtacaaggaaagagggcagttgcaggaggcaattgagcattatcgacatgcattgcgtctcaaacctgatttcatcgatggttatattaacctggcagccgccttggtagcagcgggtgacatggaaggggcagtacaagcttacgtctctgctcttcagtacaatcctgatttgtactgtgttcgcagtgacctggggaacctgctcaaagccctgggtcgcttggaagaagccaaggcatgttatttgaaagcaattgagacgcaaccgaactttgcagtagcttggagtaatcttggctgtgttttcaatgcacaaggggaaatttggcttgcaattcatcactttgaaaaggctgtcacccttgacccaaactttctggatgcttatatcaatttaggaaatgtcttgaaagaggcacgcatttttgacagagctgtggcagcttatcttcgtgccctaagtttgagtccaaatcacgcagtggtgcacggcaacctggcttgtgtatactatgagcaaggcctgatagatctggcaatagacacctacaggcgggctatcgaactacaaccacatttccctgatgcttactgcaacctagccaatgctctcaaagagaagggcagtgttgctgaagcagaagattgttataatacagctctccgtctgtgtcccacccatgcagactctctgaataacctagccaatatcaaacgagaacagggaaacattgaagaggcagttcgcttgtatcgtaaagcattagaagtcttcccagagtttgctgctgcccattcaaatttagcaagtgtactgcagcagcagggaaaactgcaggaagctctgatgcattataaggaggctattcgaatcagtcctacctttgctgatgcctactctaatatgggaaacactctaaaggagatgcaggatgttcagggagccttgcagtgttatacgcgtgccatccaaattaatcctgcatttgcagatgcacatagcaatctggcttccattcataaggattcagggaatattccagaagccatagcttcttaccgcacggctctgaaacttaagcctgattttcctgatgcttattgtaacttggctcattgcctgcagattgtctgtgattggacagactatgatgagcgaatgaagaagttggtcagtattgtggctgaccagttagagaagaataggttgccttctgtgcatcctcatcatagtatgctatatcctctttctcatggcttcaggaaggctattgctgagaggcacggcaacctgtgcttagataagattaatgttcttcataaaccaccatatgaacatccaaaagacttgaagctcagtgatggtcggctgcgtgtaggatatgtgagttccgactttgggaatcatcctacttctcaccttatgcagtctattccaggcatgcacaatcctgataaatttgaggtgttctgttatgccctgagcccagacgatggcacaaacttccgagtgaaggtgatggcagaagccaatcatttcattgatctttctcagattccatgcaatggaaaagcagctgatcgcatccatcaggatggaattcatatccttgtaaatatgaatggctatactaagggcgctcgaaatgagctttttgctctcaggccagctcctattcaggcaatgtggctgggataccctgggacgagtggtgcgcttttcatggattatattatcactgatcaggaaacttcgccagctgaagttgctgagcagtattccgagaaattggcttatatgccccacactttttttattggtgatcatgctaatatgttccctcacctgaagaaaaaagcagtcatcgattttaagtccaatgggcacatttatgacaatcggatagttctgaatggcatcgacctcaaagcatttcttgatagtctaccagatgtgaaaattgtcaagatgaagtgtcctgatggaggagacaatgcagatagcagtaacacagctcttaatatgcctgttattcctatgaatactattgcagaagcagttattgaaatgattaaccgaggacagattcaaataacaattaatggattcagtattagcaatggactggcaactactcagatcaacaataaggctgcaactggagaggaggttccccgtaccattattgtaaccacccgttctcagtacgggttaccagaagatgccatcgtatactgtaactttaatcagttgtataaaattgacccttctactttgcagatgtgggcaaacattctgaagcgtgttcccaatagtgtactctggctgttgcgttttccagcagtaggagaacctaatattcaacagtatgcacaaaacatgggcctgccccagaaccgtatcattttttcacctgttgctcctaaagaggaacacgtcaggagaggccagctggctgatgtctgcttggacactccactctgtaatgggcacaccacagggatggatgtcctctgggcagggacccccatggtgactatgccaggagagactcttgcttctcgagttgcagcatcccagctcacttgcttaggttgtcttgagcttattgctaaaaacagacaagaatatgaagacatagctgtgaagctgggaactgatctagaatatctgaagaaagttcgtggcaaagtctggaagcaaagaatatctagccctctgttcaacaccaaacaatacacaatggaactagagcggctctatctacagatgtgggagcattatgcagctggcaacaaacctgaccacatgattaagcctgttgaagtcactgagtcagcataaataaagactgcacaggagaattacccctatacctgagcctcaaccttctgggggaaagggaactagataacatacttcttacttgtctgtacagtaccttgttgcagatgggtgatatataatggtaatagaatagcacagccagacttgcttcctgcatggtagggagagacacaaaagatgggaaactgcttttccacaaggaatctccgtagaattttgcggcgaccagatggtgcataggtctggaaggtctgatctcccttggtcttccatgggatggttagtgtggaggggagatatagattgtccggccgctttgtgattccatggattgattcagtcttctggatttttttttctttatattttgggtactggagcttttaaaaatgtttggtttcaggtatttttattcatgtgaagtgtatatgattctcttgagataaggttttaagctaaaatgttactccctgttttagtttctgaactctgacagattgacagggactttgctggtgtagtctttttataggttttataaaccacttgagcctatatcagtcgttttagtgtctgacctaatatttggagctatcagtgctttgttgatttagatgatgactcaagattttttctggtccatttcccatttccttttcttccctgacccccataccctcacccttaaaattctcctgtaactcaactaacaaaatcaagcctgattcaaaacatcctagggtgttttaaacacaccatctggtgccaaatgaagatttttaggagtgattactaattatcaagggcacagttgtggtactgtcattgataataatatagtttttttttttttcctaattttgacctgtttcaccagtgttttacccttgactgccccttctatgctgcttccaaaagtgatagtgtgtgtaagatttttaccttcctttctaaagtttttttttttttttttaagtgagtcctgttcttcctatttctttcagcagaaatgaaatcccaggtaagtataagtattcaagtatttgatcagtaagtcacagttatctccagtgcattaaataaccttcatcaagaaataggttataggtaaaatctctgaaggatcatctatgtattcaagtaattattttttagataataactgtcttctggacttggtcttgaagtctgtacagattcagcctcagtagtagcgaactgcactgctgtttggtttggagtacaaattagacttatagtcctcctggaacttgagttattaaaatcataggaataaaattatgggatctcaacaaagggtcgagggtttgaggcttaaacaagccaacatatgaatatatgttttgtctcgctatactgcacttacgctatccagttgcaggtaattttttgtctgctagtagtgttctagattatgtctttccaaagcgctgaggctgtgcacctattctgtagttgcagctgatgcctgaatgtatcctagctgacaaattattgattaataagaacttgaatttctggaagattcttactgttaaccaaattttgagcaaggagtctcaaaggtaattctgaaccagaattacatgttaatgaacagtgtaccttttaacagtgtaaatcacggaatatccgtgaagggatttcttaatttattttttaccggttgattgaaatatcagttaaaggttgccagcatggttgcagataaactgatgtttgaaattcgctgaaatacttaatgtggaataggataatatacttccaatgccctcaaggctgtgaccttacagccattttacatagcacatcattcctcctatagggatgaactttttcctggcacgaaaagtagccgctctggttgaagctttgcttattgtaacaggcttttatttccaggtaatatgtcttggaagacttaattctgattagagatatagatattactggaaactaattgttttttttctattgtactctgctttatcaaagaagtaaaacatttaaatcgtactacagaaattaagatgttgtcttgcgatccttaataaatgaatgatttcccttt

SEQ ID NO: 116 - DNA, 5246 bp, Homo sapiens
tgggatgtgtaagaggagaaggagcagcccagatgatctggcccagatgcgctggcagactccgcatgttctgctttcagggacagtggcctggctggtgcacacagtcctgtggggctcatgaggtcatgggaagcagccgagcaggaggctcagggccccatgactgctacagaagttctccgctgggcactggggtcagctggactggcttccagctggccgtggacagcctcagtttcctcatctaggtaacagagacactgcctcaccagagtgggctgcaaagggaggcagtgtcaagtcttggcaccactccagccccgccgtgggttcctgtagtgttctattatttgtttgctcagggctgagctgagactctggacctgggaaaaaggaaagccagagtaggcccagggtccccaaccccagagtgcttcagccttgggggcagctccctaaggccccaggttgaccctggagctactctgcaccctctgcccccaggtctcttgtggggtcagcgctgccaagagtagaaacacttcccccagtagtggggagtactaggagctccgtggggattaaggcttgggcaaatgcctacagaactgacctacccatggaaatatgtggttatataaaactatgtttactttcgtttttttgtttgtgttttcatatagataacaagaaatctcaagcttccgtcagtgatcctatgaatgcactccagagcctgactggcggacctgctgcgggagccgctggaattggcatgcctcctcggggcccgggacagtctctgggcgggatgggtagccttggtgccatgggacagccaatgtctctctcagggcagccgcctcctgggacctcggggatggcccctcacagcatggctgtcgtgtctacggcaactccacagacccagctgcagctccagcaggtggcgctgcagcagcagcagcaacagcagcagttccagcagcagcagcaggcggcgctacagcagcagcagcagcagcagcaacagcagcagttccaggctcagcagagtgccatgcagcagcagttccaagcagtagtgcagcagcagcagcagctccagcagcagcagcagcagcagcagcatctaattaaattgcatcatcaaaatcagcaacaggtccgagctccgatggtggtgcagcagcccccagtgcagccccaggtgcagcagcagcagacagcagtacagacagctcaggctgcccagatggtggctcccggagtccaggtgagggcctgggggtggagggctccatagtcatcagcaggtgcatgttcacctgcgcatgtagtgctacagtgagggttctggttggattaggggctgggggctaagttggtaaagcaggggcttctctcccccttgcactctgcaagacacccctggagtccttggggtgggcagctgtgcttggtcatgtctaggacccaccagccgcatagtgcgtgtcgtttccagctttgctcgggcatccttcattatccctcttccttgccactctgagtgactctgggaacatgtatcagagagtagaaggctgcagttttctcctcacctctcatcttccatttgagagtctgagtacagagctgaccagggtggagggcagctttctagacactcggaagcagatgggagccacatgcagcaggagcgtgggagaaggcatcctggtgctcgcctgcactcagggactccggcgctgtgtggtcagccagagcagcctccccatgctgtcctcgccgtcaccgggccagcaggtgcagaccccgcagtcgatgccccctcccccccagccgtccccgcagcccggccagcccagctcacagcccaactccaacgtcagctctggccctgccccatctcccagtagcttcctgcccagcccctcaccgcagccctcccagagcccagtgacggcgcggaccccacagaacttcagtgtcccctcacctggacctttaaacacacctgtgaaccccagctctgtcatgagcccagctggctccagccaggctgaggagcagcagtacctggacaagctgaagcagctgtcgaagtacatcgagcccctgcgccgcatgatcaacaagatcgacaagaacgaagacagaaaaaaggacctgagtaagatgaagagccttctggacattctgacagacccctcgaagcggtgagctttgcccacagcccacggagggtccacaagggcacagatagcccagccatggatgggcacttggtgatgatgtgggtttaacaaaggcaccaggcagctctttggaccctggccagaggcctccaaggctccactctggtgtgtgctggggcttcaagcccaggcttcatcttggcccatgcccagcctttgccctattcctggctgctgctgtggccctcatgctgggccatcacagccagacctcatccagtcagcagccaggggcccagcttgcagtggcctgaccatcagctggcccagatgggcctgagcctgacctggagttctgcccctgacttgctggtgaccatgggcaggcgactgcatctcagttaccccatttgtagcccacgtgtgttgtcatgaaaatgaaacaaggtggcgctggtgagaagcaggtggaaggcagggctgctggccacaggctgctgtgaggatcagagctcgggcagtacctccaaactgcatgggcattggcatatacctccctttcacctcaactcaggctatcccccaacccctgtctagaagggtctctctgttctgcttgtctggatagaatgccagtcactattgggtggtcctccaggtcttcatgggttgatcctttgttagggttatagggatgagtggggcagggactggcctacatgacaatgaggcattcacagcctgatcaggggcctggccactgtcccttctcttgacccatcacctcactctgccaaccagggacaagcagctcctggggttgagggctgcctgccttcaactctgggtctgggaacagctggtcaactggtaggagctcctgcagaggtttctgatggctgaggcccagtggcagtagttgggatcctgagcctgagaactgccatgtcttccactctttcagcccaagtcctctctctctgcaggtgtcccctgaagaccttgcaaaagtgtgagatcgccctggagaaactcaagaatgacatggcggtggtgagtgggatgccagacacccctaggggaaccagggctctcctaagagctcctgggagtgctgctgagagggccttcaaggtcagggcatctgggcgggggccgggcctgaccttggaccctgcccacgaggcttcctggccaggtctgctgtgctgggtgggaacatgggagaagtcaccctctgtctacggcccccgtgggtgcctccttcacccatttcagaggaggcagggactgtagggaggataggctgtgggggtgggggattattcccaggatcagccaacattgtctgcacaagggtggaggctgtgagagaggcctcgggaatctgactgtgagtgaccatgggcctggggtgtgaaggccccctaaatggggaaccctcgggtcccgggctgctgaccgtgcccatcctgtctccagcccactcccccaccgcccccggtgccaccgaccaaacagcagtacctatgccagccgctcctggatgccgtcctggccaacatccgctcacctgtcttcaaccattccctgtaccgcacattcgttccagccatgaccgccattcacggcccacccatcacgtatgtccagctgggctgggctttgcggagggcggccagccctgggccgcgtgtgccaggtgtggtcaccatgccgcctccccggggccccagtggtgtgcacccggaagcgcaggcttgaggatgatgagcggcagagcatccccagtgtgctccagggtgaggtggccaggctggaccccaagttcctggtaaacctggacccttctcactgcagcaacaatggcactgtccacctgatctgcaagctggatgacaaggacctcccaagtgtgccaccactggagctcagtgtgcccgctgactatcctgcccaaagcccgctgtggatagaccggcagtggcagtacgacgccaaccccttcctccagtcggtgcaccgctgcatgacctccaggctgctgcagctcccggacaagcactcggtcaccgccttgctcaacacctgggcccagagcgtccaccaggcctgcctctcagccgcctagccaagactgcagggatggcccgcagcctcatcggggccaaggacacacgcctcctgtcagacacttctaggtgttggcttccttagagagcctggggttaggttagctttcctgcttttatcttctgccttggggacctgccaaacgaaatcccacacctgtacagaactgggataggcgcagtggagcgggttgcttggggggcgttggccgacttcttagagaaggccctccatgtgacttcctcccaggagccagatgcgatcctcaggctgctctcaccgtggcctgtccacggtccaggtccatctcagcagcgtgagggtgcactcagggtgttgttagagcgtctcgtgtgtgctagacgcacccctactcgttcctatagaacacagaggacataggaaacccttaaaacacacatgggattctctggtcacagttttgggttcaggctatgctgctttgggcaggtggagcaccccccgaggaagcctgcaagtccagggcacaggctgccttttggagggagggctggcccataggtgctgctggctccccgccaccagctgggcctcagccctcacggcattcctgctgagcaccgtggggcacccagggagcaggggcgtcagggatcctgctgccggcacccctgtgccgctggcatgagggccgtgtccccactgtgaaggatgaagagcaaggccctcaggacccgtgtcctcagagcaccacacactgagcacccagagacagcgggcctggcagcgggccgggccatgcagggagcgcctccctatgttgcctgccactctgggcaccggccagcaccctctggtgagaagaggtcccccctttttatgtgcactaccccaccatctgtgattataataaatttattattcctg

SEQ ID NO: 117 - DNA, 4801 bp, Homo sapiens
gagaaatcccaggggtggatgaggcacctagctggtgcccgcctgcaggctgctcgcttgctgagaggcggcgtgccagctccgcgcaccgcgcctcagtgccagatcagggagctgtcagctcagcgcccacgcccctccgcttcagctccggggagccccagggtgggctgctggaaggcgcgactgcaacttgactttgcctcactgttgttgctggcagaatacgtacaccaatgcggacaagctcctagaagcagcagagcagttggctcagacgggggaatgtgaccccgaggagatctacaaggcagctcgacacctggaggtgcgcatccaagacttcgtgcgcagggtggagcagcggaagcttctcctggacatgtctgtttccttccacacacacaccaaagagttgtggacatggatggaagaccttcagaaggagatgttggaggatgtctgtgcagattctgtggatgcagtccaggaactgatcaaacagttccagcagcagcagaccgccactctagatgccacactcaatgtcatcaaggaaggcgaagaccttatccagcagctcagggactcggctgtgtccaacaacaaaacaccccacagcagctccatcagccacatcgagtcggtcctgcagcagcttgatgatgcccaggtgcagatggaggagctgttccacgagcggaagatcaagctggacatcttcctgcaactgcgcatctttgagcagtacaccatcgaggtgacagcagagctagacgcctggaatgaagacttgcttcggcagatgaatgacttcaacacagaggacctaaccctggcagaacagcggctgcagcgccacacagaacggaagctagccatgaacaacatgacctttgaggttatccagcagggacaggatctgcaccagtacatcacggaggtccaggcatcaggaattgagttgatctgtgaaaaagacattgatctggcagcccaggtgcaagagttattggaatttctccatgagaagcagcatgaattggagctcaatgcagagcagactcataagcggctagagcagtgcctccaattacgtcacctccaggctgaagtcaaacaggttctgggatggatccgcaatggagagtcaatgctcaacgccagcctggtcaatgccagctctttgtcggaagcagagcagctgcagcgggagcacgagcagttccaactggccatcgagtccctctttcatgccacttccttgcagaagacgcaccagagtgccctgcaggtacagcagaaagccgaggtgctgctccaggccggccactacgatgccgatgccatccgggaatgtgctgagaaggtggccctccactggcagcagctcatgctgaagatggaagaccggctaaaattggtcaatgcctctgtggccttttacaaaacttctgaacaggtgtgtagtgtcctggagagcttagagcaagaataccggagagatgaggactggtgtggtggacgagataagctggggccagcagcagagatcgaccatgtcattcccctcatcagcaaacatttggaacaaaaggaggcctttcttaaggcctgcaccctggctcggcggaatgctgaggtgtttctcaagtacatccacaggaacaacgtcagcatgcccagtgtcgccagccacactcggggacccgagcaacaagtgaaagccatcctgagtgagctcctgcagagggagaatcgcgtgctgcatttctggaccttgaagaagcggcggttagaccaatgccagcaatatgtggtgttcgagcgcagcgctaagcaggcgcttgactggatccaagaaacaggtgaattttacctctcaacacatacctccactggagagaccacagaggagactcaggaactgctgaaagaatatggggaattcagggtgcctgccaagcaaacaaaggagaaggtgaagcttctgattcagctggccgatagctttgtggaaaaaggccacattcatgccacggagataaggaaatgggtgaccacggtggacaagcactacagagatttctccctgaggatgggaaagtaccgatactcactggagaaagccctaggagtcaacacagaggataataaggacctggagctggatattatcccagcaagcctttcggatcgggaggtcaagctgcgggacgccaaccacgaagtcaatgaagagaagcggaagtcagcccggaagaaagaatttattatggctgaactactccagacagagaaggcttatgtaagggatttgcatgagtgcttagagacctacctgtgggaaatgaccagtggtgtggaggagatcccccctgggatcctcaataaagagcatatcatctttggcaacatccaagagatctacgatttccataacaacatcttcctcaaagagctggagaagtacgagcaactgcctgaggatgtgggacactgctttgttacctgggcagacaaatttcagatgtatgtcacctactgtaaaaacaagcctgattccaaccagcttatcctggagcatgcgggcaccttctttgatgagatacaacagcggcatggtctggccaactccatctcttcctacctaattaagcctgtccaaaggatcaccaaatatcaactgctcctgaaggaacttttaacttgctgtgaagaagggaaaggggagctcaaggatggcctggaggtgatgctcagtgtcccaaagaaagccaatgatgccatgcatgtcagcatgctggaagggttcgacgagaacctggatgtgcagggggagttgattctccaggatgcctttcaagtgtgggacccgaagtcgctgatccggaaggggcgggagcggcacttgttcctctttgagatctccttggtttttagcaaggagatcaaagattcttcaggacacacgaaatatgtttacaagaacaagctactgacctcagagctgggtgtgaccgagcacgtggagggcgatccctgcaaattcgccttgtggtctgggcgcaccccatcctcagacaataaaacagtgctgaaagcctccaacattgaaaccaagcaggagtggatcaagaacattcgagaagtgattcaagaaaggatcattcacctgaaaggagctttaaaggagccacttcagctccccaaaacaccagccaaacagaggaacaatagtaagagggatggagtggaggatattgacagccagggggatgggagcagccaaccagacaccatctccattgcttctaggacctctcagaacacagtggacagtgacaaggatggcaaccttgttcctcggtggcacctgggacctggagatcctttctccacttacgtttagcgcgcatcctgggacttgtccctgcagctcaccgggttagccgtggcaccgttgggacctcccaccaggactccaatcacccacctctcttgagacttctctggcagggctggtgtggggtgcagcctttgctcagagggcaacatgttccaagcaaaatctccccgcctgggccatgggctcaccctcggggctcccttcttctctactgggtgcaattcgaggttgctgagcttctctccaaagtctaaaatggtggggcagtagggacctgtgagaggcccaatggcccaatgtacttcccccagatcccactcagaacagcaggtacgcccaggctcctgctgccctagaggtctgcaacatgagtgaagaggttaattagagggacacacttatctctgaagtttttctccaggctgaacatttctattatcagtggcccctaatctggaaaaacccatcattctaatctagcttgtatccccacatcatgagaaagagggaagaagaagaagggatgatgtgtggtagagaagatgagggttaactttagcctttcccaaacactggcaacaaccacttcctcaacaatttttctatttgcttcagcctactcagattttttcaggtttttctagctcctccataacctcactccctcccgaggtctctggttcaaagaccaccctaccagcccctatttgcttcaggttatcctgttgagggtgggtgggaagagtgagaagatataaatgaaaaactggccacatgttgataattgttgaaactagatgatggtacgtggacattcattataccattctccccacttctgtatttgtttgcaatttttcataataaaaaagttttaaaagtcctccagtttccaacacactcaagagagagccccaaccccaaacacagagtttcatggaaaccccacaccaaggcaagaggcagagatgatgattccatttcatatatacactcattttctaactttttttaaaggcccactgctttattttcaatagattaaacctgatttctgagaggtcctgaagttgggcttatttccctggctgggttatgggggagggcagggtaaagggatccttaaaaaagtttacacttctatgtatctcacaatcttattgtgaggatgtgacttgttcagtgttctgaacttttcgaaggaatcgtgctctcaatgcaaagtgtcattctctggaattgcacctggctcaggaaaggactgtctttgtacttgaatttaaatccaatggagaactttaacacgggcatttgcatgactgagaattgctgctgtcttttttccgtatgtcactttcttgaatgtgttctaataaaatgattctaaagcag

SEQ ID NO: 118 - DNA, 4651 bp, Homo sapiens
tccaaagacaaatcacccaggaatgtgagttagttgaaaccagtaattctgaggacagattattgaagcactgggtaagccctttaaaggatgcaatgagacatctcccttcccaagagagcggtatcagggaaatgcatattatcccccagaaagccattgtgggagagattggccatggatgtaatgaaggagaaaaaatactttctgcaggagaaagctcccatagatatgaggttagtggccaaaacttcaaacagaagtcaggattaactgaacatcagaaaattcataatataaataagacctatgaatgtaaggaatgtgaaaaaaccttcaacaggagttcaaacctgatcatacatcagagaattcatacaggaaataagccatatgtgtgtaatgaatgtgggaaagactctaatcaaagttcaaatcttattatacatcagagaattcatacaggaaagaaaccttatatatgtcatgaatgtggaaaagacttcaatcagagctccaatctggtgagacataagcaaattcacagtggtgggaatccctatgagtgcaaagagtgtgggaaggcttttaagggaagctcaaaccttgtcctgcaccagagaatccacagtagggggaagccatatttatgcaataaatgtgggaaggctttcagtcaaagcacagatcttattatacatcacagaattcacactggagagaaaccctatgaatgttatgactgtggacagatgttcagtcaaagttcacaccttgtcccacatcagagaattcacactggagagaaacccctcaaatgtaatgaatgtgaaaaagccttcaggcagcattctcaccttactgaacaccagagactccacagtggagagaaaccctatgaatgtcacagatgtgggaagaccttcagtgggcgcacagcttttcttaaacatcagagattgcatgctggagagaaaattgaagaatgtgagaaaaccttcagcaaggatgaggagcttagggaagagcagagaattcaccaggaagagaaagcttattggtgtaatcagtgtggtaggaatttccagggcacctcagacctcatcagacatcaggtaactcatacaggagagaaaccatatgaatgtaaagaatgtgggaaaactttcaatcagagctcagaccttctgagacatcatagaattcacagtggagaaaaaccttgtgtatgtagcaaatgtgggaaatcttttaggggcagctcagatcttattagacaccatcgtgttcatactggagagaaaccctatgaatgtagtgaatgtgggaaagcctttagccagaggtcacaccttgttacacaccagaaaatccatactggagagaagccctatcagtgcactgaatgtgggaaagccttcaggcggcgttcactccttattcaacatcggagaattcatagtggtgagaaaccctatgaatgtaaggaatgtgggaagctcttcatttggcgcacagctttcctcaaacatcagagcctgcatactggagagaaacttgaatgtgagaaaaccttcagccaggatgaagagcttaggggagagcagaaaattcaccaggaagcgaaagcttattggtgtaatcagtgtggtagggctttccagggcagctcagacctcatcagacatcaggtaactcatacaagagagaaaccatatgaatgcaaagaatgtgggaaaactttcaatcagagctcagaccttctgagacatcatagaattcacagtggagaaaaaccttatgtatgcaacaaatgtgggaaatcttttaggggtagctcagatcttattaaacaccatcgtattcatactggagagaaaccctatgaatgtagtgaatgtgggaaagccttcagccagaggtcacaccttgctacacaccagaaaatccatactggagagaaaccctatcagtgcagtgaatgtgggaatgccttcaggcggcgttccctccttattcaacatcggagacttcatagtggtgagaaaccctatgaatgtaaggaatgtgggaaactcttcatgtggcacacggctttcctcaaacatcagagactgcatgctggagagaaacttgaagaatgtgagaaaaccttcagcaaggatgaggagcttagaaaagagcagagaactcaccaggaaaagaaagtttattggtgtaatcagtgtagtaggaccttccagggcagctcagatctcatcagacatcaggtaactcatacaagagagaaaccatatgaatgtaaagaatgtgggaaaactcaatcagagctcagaccttctgagacatcatagaattcacagtggagaaaaaccttacgtatgcaataaatgtggggaatcttttaggagcagctcagatcttattaaacaccatcgtgttcatactggagagaaacctcatgaatgtagtgaatgtgggaaagtctttagccagaggtcccaccttgtcacacaccagaaaatccacactggagagaagccctatcagtgcactgaatgtgaaaaagccttcaggcggcgttcactccttattcaacgtcggagaattcatagtggtgagaaaccctatgaatgtaaggaatgtgggaaactcttcatgtggcacacagctttcctcaaacatcagagactgcatgctggagagaaacttgaagaatgtgagaaaaccttcagcaaggatgaggagcttaggggagagcagaaaattcaccaagaagagaaagcttattggtgtaatcagtgtggtagggctttccagggcagctcagacctcatcggacatcaggtaactcatacaggagagaaaccatatgaatgtaaagaatgtgggaaaactttcaatcagagctcagaccttctgagacatcatagaattcacagtggagaaaaaccttatgtatgcaacaaatgtgggaaatcttttaggggcagctcagatcttattagacaccatcgtgttcatactggagagaaaccctatgaatgccctgaatgttggaaggccttcagtcagaactcacaccttgtcagtcatcaaagaattcataccagagagaaaccctttgaatgtagcaactgtggtaaggccttcagtgggtggacagcttttcttaagcaccagaaacttcacattggaaaggaatttgaagactgtaagagtctacaaacaggacctattctaataggtagcagaaacctaatgaatgcagtaaaactaggaaaagtctgatggagaccacatcttattgcactacaaatgagttttattagaaaaaaaccatgggaaggtgggaaagcagagaaaatacctactggatttttcaaacgtaagtataatcaagtggaaaagccaaaagctcttggacataatcaccttttttttttctgtctcagaactgacactagaatatggtcccaacgatacaattttttaaattatttattttttaacatacaaagagatgaggtctcactatgttgcccaggctggacttgaactcttgggctcaagcactcctccctcctcagcctcccaaagggttgggattaccggcatgagccactgcaccagccccaggggtctaattacttgagaatgttttaagggatgtctatcattattaaaatcattataaatcactttggcaacaaccccaaaactaaattattcatggaaagagccatttcaatcttgacttcctagtcgagtgacaagtttaaatgtgggaaaaaaccctgtgaaagtaatgagtgtaggccaggtgcggtggcttgtacctgtaatccagcactttgggaagccaaggtgggcagatcacgaggtcacgagttgatcatgaggagttactatgcccagccaacatactaaaaccccgtctctactaaaaataacaaaaattagccaggcatggtggggcacgcctgtagtcccaggtacttgcgaggctagggcaggagaatcacttgaacctgggaggtggaggttgcggtgagccaagatcatgccactgcactccagcctgggcaacaagtgcgaaactccatctcaaaaaaaaaaaaaagtctaactcttctgcttgtctttacaatgctgtacagtgagagctaatgtttataaggataaacaggatacttacagggatttgaaggtaatttaattcagtggtttccaactttttaatcaccaaggccttctttttactcccctatgtcctgtgtcttaaaagattatgtttaccaaactgcatttattaaagaattatattttgctacataaaggcatgtacaacacaaatcatgcttctgactggcaccatgtaggcagacctaggtactaaaattccagcccaaagcaaataatttaccattttcattagtctttttattccttttgtgggcaaacatatcgtctatgttaggctttttgaaatattaactatgacttgtaaactccagattaaaaactaaccaattcatctttgatggagcttgaatcaaactaagggtattggacttttgaaagattgaaatttttgttacagtatggaatgtttttaactgaatgttgaaataaaagttatttaagaatt

SEQ ID NO: 119 - DNA, 4293 bp, Homo sapiens
gggcgccttcagcgccagcctcttcgctccgtccaagccgcagcgccgcaagagccccctggtgaagcagctgcaggtggaggacgcgcaggagcgcgcggccctggccgtgggcagccccggtcccggcggcggcagcttcgcccgcgagccctccccgacccaccgcggtccgcgcccgggtggcctcgactacggcgcgggcgatggcccggggctcgcgttcggcggcccgggcccggccaaggaccggcggctggaggagcggcgccgctccactgtgttcctgtccgtgggggccatcgagggcagcgcccccggcgcggatctgccatccctacagccctcccgctccatcgacgagcgcctcctggggaccggccccaccgccggccgcgacctgctgctgccctccccggtgtctgccctgaagccgttggtcagcggcccgagcctggggccctcgggttccaccttcatccacccactcaccggcaaacccctggaccccagctcacccctggcccttgccctggctgcccgagagcgagctctggcctcccaggcgccctcccggtcccccacacccgtgcacagtcccgacgccgaccgccccggacccctgtttgtggatgtacaggcccgggacccagagcgagggtccctggcttccccggctttctccccacggagcccagcctggattcctgtgcctgctcgcagggaggcagagaaggtcccccgggaggagcggaagtcacccgaggacaagaagtccatgatcctcagcgtcctggacacatccctgcagcggccagctggcctcatcgttgtgcacgccaccagcaacgggcaggagcccagcaggctggggggggccgaagaggagcgcccgggcaccccggagttggccccggcccccatgcagtcagcggctgtggcagagcccctgcccagcccccgggcccagccccctggtggcaccccggcagacgccgggccaggccagggcagctcagaggaagagccagagctggtgtttgctgtgaacctgccacctgcccagctgtcgtccagcgatgaggagaccagggaggagctggcccgaattgggttggtgccaccccctgaagagtttgccaacggggtcctgctggccaccccactcgctggcccgggcccctcgcccaccacggtgcccagcccggcctcagggaagcccagcagtgagccaccccctgcccctgagtctgcagccgactctggggtggaggaggctgacacacgcagctccagcgacccccacctggagaccacaagcaccatctccacggtgtccagcatgtccaccttgagctcggagagcggggaactcactgacacccacacctccttcgctgacggacacacttttctactcgagaagccaccagtgcctcccaagcccaagctcaagtccccgctggggaaggggccggtgaccttcagggacccgctgctgaagcagtcctcggacagcgagctcatggcccagcagcaccacgccgcctctgccgggctggcctctgccgccgggcctgcccgccctcgctacctcttccagagaaggtccaagctatggggggaccccgtggagagccgggggctccctgggcctgaagacgacaaaccaactgtgatcagtgagctcagctcccgcctgcagcagctgaacaaggacacgcgttccctgggggaggaaccagttggtggcctgggcagcctgctggaccctgccaagaagtcgcccatcgcagcagctcggctcttcagcagcctcggtgagctgagctccatttcagcgcagcgcagccccgggggcccgggcggcggggcctcgtactcggtgaggcccagtggccgctaccccgtggcgagacgcgccccgagcccggtgaagcccgcgtcgctggagcgggtggaggggctgggggcgggcgcggggggcgcagggcggcccttcggcctcacgccccccaccatcctcaagtcgtccagcctctccatcccgcacgagcccaaggaggtgcgcttcgtggtgcgcagcgtgagcgcgcgcagtcgctccccctcgccgtcgccgctgccctcgcccgcgtccggccccggccccggcgcccccggcccacgccgacccttccagcagaagccgctgcagctctggagcaagttcgacgtgggcgactggctggagagcatccacctaggcgagcaccgcgaccgcttcgaggaccatgagatagaaggcgcgcacctacccgcgcttaccaaggacgacttcgtggagctgggcgtcacgcgcgtgggccaccgcatgaacatcgagcgcgcgctcaggcagctggacggcagctgacgccccacccccactcccgccccggccgtgccctgccggcagggccccccacccccaccccgggccgcgggctcggcctgccccttacgacggcgcccgggccaggaatgttgcatgaatcgtcctgtttgctgttgctcggagactcgccctgtacattgcttagtgccctcaccggccgcccagcccacccagcgcacagtcaggaagggcgtggaccagggaggctggggcgggaggtgccgggggtggggtgccctagcgtgaccacctccttcgcagctcctggtggccattctcccagagggggaacctagtccagcatgcgaggtcaggacccgccttggtgactcggggggaggggggagacattgggattctcgatgggggccaaggagcccccctgttttgcatattttaatccactctatatttggaacgagaaaaggaacaaatatctctgtccgtaatagtttcctctcccctcccttctacttccactggtcccactgcagctgcccagtcttccatctccggcccctcactgccactgccaccccacaacggggcaggggacgctccagctggtctggggttggccagggccctagtggcccgccctggggccccagctcggcccctcgcctcgctgagctctagtgtgccccaccgacccttcaggtgctgctcgtggtgggaggggcggcaggccgcgggtcctgctgtgcacccgcgggaccagccggcctgggagaccatcggccgggggggatgagggcagggccctgccgctccaccgcagccatcttcctcacagggtctctccccaaggagggggctagcttggtccccatgctcttgggcaactacagcagagaagcctccctgccttggaccccaaagtctcctgtcctgccctttatgtgtgtgggtgaaactgggtgcgtctgagcacgtgggagccgtgtgtgtgcctgattactgagtggccaccaggggccgctctggactagcgcggggccgtggaggcgtgcaccgtgtgcatgcgtggggtgtacctgtgagagcaccctgtctcctcttccaaagaaagtcagaggccatcctgcaccctgggtccagctgtttgcccagcctgtccttccagagcctcacccagcctgagcggggttccctggtgaatccctgctgcttggggaggccccaagggccccttggaggcagcgcccccaccttgggcttctgagggcatcatagggggacccctagagtcagttcaccacaggccctggggagagtcaaagacccccgagggtgcccagccccccacactgtgactcctcacactcagcgatgacctgtggggtggggggccctgggacgtttttaaacctagggtttggagtctggactaagctccatccacgtcactcacaagtttctgtttatatttctagctttttttaataaaataaaaaaaaaaagaaaacagaagttttcacaacccaggggcctggcacgccggtctgtgcctgcccgccccgccctggcccaccggccccactccctgggcacagagtcacacccactcatccttccgccaacagtccaggtcacacagcagcagtcactgtaacagactgccacatacacactcggtctcacactcacctgtgggttttggttccgttcaatttgggtttttaactttacagggtcagttccgcttcacctccttttgtatggagttccatccagggggtttcaccccctgctccagtcctgaggcctcctgaccctgacgttgtgatacgccccacagagatctatgtttcttatattattattattgataataattattataatattattatgtaataaatttataagaaatg

SEQ ID NO: 120 - DNA, 7706 bp, Homo sapiens
gcaggggagacaatagcgaacatgctgtgtgggctcagccgggagacccctggagaggcggacgatgggccctactccaaaggaggcaaggacgcaggaggggccgacgtttccctggcgtgccgcagacagagcattccagaggagttccgagggatcactgtggtggagctgatcaagaaagaaggcagcacgctgggcctgactatctcaggtggcaccgacaaggatggaaagcccagggtctccaacctgagacctgggggacttgcagccaggagtgatctgctgaacattggtgactatattcggtctgtgaacgggatccacctgaccaggctccgccacgatgagatcatcaccctgctcaagaatgtgggcgagcgcgtggtgctggaggtggagtatgagctgcccccgcccgctcctgagaataaccccaggatcatttcaaagacagtggacgtctccctctacaaggagggcaatagctttggctttgtccttagaggaggtgcccatgaagatgggcacaagtcccgcccgcttgtcctgacctacgtgcggcccggtggccctgccgacagggagggctccctgaaggtgggcgacaggctgctcagcgtcgatggaatcccgctgcacggggccagccatgccaccgccctggccaccctgcggcagtgcagccacgaggcactctttcaggtggagtatgatgtggccacccctgacacggtggctaatgcttcgggacccttgatggtggaaatagtcaagacgccagggtctgccctggggatctcgctcaccaccacctccctccggaacaagtcagtcattaccatcgaccgcatcaagccagccagcgtggtggacaggagcggagccctgcaccctggagaccacatcctgtccatcgatggcaccagcatggaacactgctcgctgcttgaggccaccaagctcctggccagcatttcagagaaggtgcggctggagatcctgcctgtgccccagagtcagcggccactgaggccctcagaggcagtgaaagtgcagaggagtgagcagctgcaccgctgggacccctgcgtgccctcctgccacagcccccggcccggccactgcaggatgcccacctgggccacacctgctggccaggaccaaagccgatccttgtcttcaactcccttttcctcgccgaccttgaaccacgccttttcctgcaacaaccccagcacccttccccgtggatcccagcccatgagtcctcgaactacaatggggcggaggaggcagcgaagaagggaacacaagagctcgttgtcgctagcctccagcacggtggggccgggcgggcagattgtgcacacggagaccacggaggtcgtgctctgtggagaccccctcagcggctttggcctccagctccagggcggcatcttcgccaccgagaccctgtcctccccacccctcgtgtgcttcatcgagcctgacagcccggctgagaggtgtgggctgctgcaggtgggggaccgtgtcctgtccatcaatggcattgccaccgaggacgggactatggaggaagccaaccagctcctgcgggacgccgcgctggcccacaaggtcgtgctggaggtggagttcgatgtggcggagtccgtcatcccaagcagtggcaccttccacgtgaagctgcccaagaagcgcagcgtggagctgggcatcaccatcagctcggccagcaggaaacgaggggagcccttgatcatctccgacatcaagaaaggcagcgtggcacacaggacgggcaccctggagccaggcgacaagctactggccattgacaatatccgcctggacaactgccccatggaggacgccgtgcaaatcctgcggcagtgcgaggacctggtgaagctgaagatccggaaggacgaggacaactctgatgagctggagaccacaggtgccgtcagctacacagtggagctgaagcgctacgggggtcccctgggcatcaccatttcgggcacggaggaaccttttgaccccattgtcatctcaggcctcaccaagcgtggcctggctgagaggactggtgccatccacgtgggggaccgcattctggccatcaacaacgttagcctcaagggccggccgctgagcgaggccatccacctcctgcaggtggctggagagaccgtcacactgaagatcaagaagcaactagaccgtcccctcctaccccgcaagtcgggcagcctcagtgagaccagtgatgctgatgaggacccagcagatgccctgaaaggaggcctgccagcagcccgcttctcgccggctgtgcccagtgtggacagtgctgtggagtcttgggacagctcggccaccgagggtggctttgggggcccagggtcctatacaccacaggcagcagcccggggcacgaccccccaggagcggaggcctggctggctgaggggcagccccccacccaccgagccccggaggacgagctataccccaaccccagctgacgagagctttccagaggaggaggagggggatgattgggagccgccaacgagcccagcccctggccctgcccgagaggagggcttctggcgcatgtttggagaagctctcgaagacctggagtcatgtggtcagtcagagctgctgagggaactggaggcatccatcatgacgggcaccgtgcagagggtggccctcgagggcaggcctggccaccggccttggcagaggggccgggaggtacgagcctctcctgcagaaatggaggagctgttgctgcctacacccttggagatgcacaaggtgaccctgcacaaggaccccatgcggcatgactttggtttcagcgtctcagatggcctcctggaaaaaggtgtctatgtccacactgtgcgccctgatgggccagcccaccgtggaggcctccagcccttcgacagggtcctgcaggtcaaccacgtccgtacacgggacttcgactgctgcctggcggtgccactcctggccgaggcgggtgatgtcttggagctgatcatcagccgcaagccgcacacggcacacagcagccgggccccccgatcgccaggccccagcagtccccggatgctctgaagtcagcatgtgggccgaactcctaaggggccacccaggcagatcctggctcccagacacgtagctgggctggagaagcggccacccactcattcatctgttggtctggcagactctgagcctgggatgatgcttggtctctgttccccaggtctgtggtgactggggtgccaggcagggaggtcctgccctagttggagtgacagctggggtctctcgccaagttgggtctccaagatgcccagaggagcctcccttaagaagggttggcacaggctgctcagccgagaggagagaggcctgggggctgtcccaggtctctgtggggcctccttggagaggtcgaagatgtagggagcacttcctcccagcaaagccatggagctggaatgagctgcaaggaggagtgagttctcggtcacaggaggtgagcaggcaggagctggataccccagcgcagtcatgcattggggtatgaggcattcccatgatgcgtgcacacgcgcttgggggttggcttcctgatggggagccacttcatctagagactcggccaccaggaaggatgctgcttcggatgggagcccagctccttcgcttctccagaataggggtttggggcttgctagtcctgagattctgagattcccagaatctggtccccacttatgagactcttaagttggggcgtctgggatcccaggaagtgctggccctttgattctgaaagtgggtgattctttgatttcagcatctcagtctgaagcttctgggacttgagactgtggttctgggcccattgggcaggctctatgggccttgggctctcagccctcctgcttcttctgtaggccgtgtggccactgacccatctgcacgtccgctcagcccaagcccctccatgtgggaggggtcattttggggcaaaagaccctggagcttccattcacctgccatccagtgaaaattgaaaagcgatggacgcaggacctgtgaggcggtagcgctcctctttacagccagatcagtggaggaagaggagaaagagggagggagatgggagagaaatgggccagagaaaaagatgggacactcttgcccagtggagggtgtccaaagtgcttattcaaagaagtctattcccacttgaaatctggaagcaccagcatcccttaaaatcattgtcctcagtgtccacaaatcagagaccctcttcattttgagaagggtgtgggcctcccctggtggtctagtgagtggtgcctgggatggagtgggcgggcaggtgtagccagggctggggatgtgctttgcctggcccagttctcacaggggtctcaggaaaacggggcacccactcccacctccatctgtctccaacctggggtccctggaggccagaaaagtgctcttccatttgagggaacagatgaggagtcaagaggtctgttcttttcaccctgggtctgttacctgtttgctgtgtgaccctgtctgggttggacccccagcccctctggacgatcacgggtggacagtctgagcagacacaggcctcctggtcagggccggaaccatctctgccgacccaccaaggcccccttggggacctgcccacgctgtctcctggaggcctgcctcccttacccctcccctccacttcgctgggctctgccccttggtgccctccctgagggccctgcatgcttgtgcctggggtgctcagcgcctctgctatcttggattcccgtgtactcagcccagagtgaaagggcactgtctacctgtcacagggcaccaagtgaaagccaagagccctcacttttgagggtgagggacagcacagcagaggtgtggcttctggatgcaagcagccatagctgtgtgaccttggacaggtggctcagcctctctggacctctgctaagcaacagggctggacaggacacactctcagggcctctcggcttgggaaaactgcattgactccaggactccaggcgagggaagatgcacccgactctaactaatacccccctccctcctcgggctgaggcctctgccattctcccaaaagtatgcaatcaggcccgcggtgggcctcccagccatgccggcctcctcatatgcaatatttcttctggcttctcatggggatggttcatccccgacttgaaatttcctgacacctttccccagtgagcgccctgcctgcctatgcattttgggaacagcccctgtgacatgtccccttccacctgccctctcccccaaagctgtatttttctctggctgagattagaacacattccttgtaaagtatttttctacatcgggttttcttagggctctcgggaagcacaaggggctgtattgcaaaggccgcttatggtctgtttggggccctcgtctaagtctttgtcccaccaggggttgcagtggcttgggggtaggtgccatggggatgattttttaaaataaaattatttaaatccacctagagtagaagtttgctttttaaaaaaatcatggattggcaagagtcagcttctgtatgggtctggtgacatctcacctgcttttgatgattcattaattcaaaaagtttgccatttgcttccatcatccagcccctgggcaacatgaatcagacagatttaggtcatgtctgcacattctggtggcaggcagacaatcaacaagtaagcaaataaataattatttcaaaaggcatcaagtgcaacaaagaaaacaagggagtaacgggatagagggaccagggtgaggggctttagctcacaatattaggaggggtttctctcaagaggcgacatttgcaatgagacctgaagacaggagccagcctccatggagacctggaggaagagtgtctcaggcagcgggcacagctagtgcaaaggccctgagataggaacgagtttgacggtctcaaggaagagaaagaaggcctgggaggggaatggggctggagactaggttggaggtagcaggaatcagtcgtgaaggcttgggtagggggagcaaatttgattctctgcgcagcagaaagccagaggcaggcagtggtgcctgcatatggagtctctttagcccaggttgggaaggtagtggcaggagggcagcctcgggtctggctgctgccctggagtgtccagagagtgtctagggcaggtgagctacagggtctgggacccagaggccagggccaggccccactggggaggccacagttctgtgagcagaggaagagcttctttccaggaagcgagtactctgtcttgggagtggtgtaggcagggggaaggccaagggaggcagcaggccttgctctaagcgctttgcaagagcttgctggatcctcccaagagcctttggaggtgggctctattcctgtcccatcattacagatgaggaaacaggcacagagaggttgagtaacttgcccaaggccacacaggtagtaagggatggaaccagggcttgaacacaagccacatggccagtacacatagagagagggagggaggtaggcagaggctgtcagaaagagccagaaaatgggggtagggtggtcttctattctaacattgtctataaatgagttactgagaattttgtctggttagttgggcaaagggctcaactgactcccgagtttgtccatcccaaagggtggggggcgctgttggcaggaaggctgccccaaacatggacctgttgtgaccccagagagcccctaactgggtattaatgagcgcctgcacctgacggtgggggagtgggagaagggcaatcaggtttgctccccctctaccctttcccccactccgccacccgctttctgcccttctggcaggtcagcccaaggctaaagaggagggactgaaagccgcagcaggtgagcacctaaggccaagagcatcacctccaatcatcctggtggccttgatggggacaatggtttattccagatggggaaactgaggctcaggtgactgctgccagatctcccagctgtacagggctgggcatgtagcaggtagaatcagtagagccagtagagccaagagctcatgggcccgggtgcgaatccaggttctttcatggacttgctgtgtacccctgagtgagcaagctgcttcctctgtgagcctccatgtgggaacctctaacctgggaaaatacctacctttgaggagcgtcctgggattggacgggaagccctttataaaatgtaaagcgtttggcaaacgttgagggggaaatacctcaccagaacacaacccacacatgttggatgttaaaaaggaaatgtttattttcatgttataaggtgattacaaactcctctaaaaaaagcaaagatgaatttaaaatattgatatacatatttatctaaaaagcaaaagagaaaaaaacccctgcaaaatacagggaatcatatcataaaacatttatacacaaaagcttgtatactgcaagactgaactacacaccaaggatcttgttcaaatacaaatgttcctcctcag

SEQ ID NO: 121 - DNA, 2893 bp, Homo sapiens
gtttgtcacagtggactccctgtggcgggaagggaagaacttttgcacagacaaggcttcagctctaggaaccccactgacaacttgaatctcaacctctaacctagtgtgaggttcttcctgtgcccaccttttctgccttttgagaagagaaactcttctcctggccatctagagcccaggaagccccaagctggggccctggtcccagcatgtcagtcctctcttgtgcatagggctctgccctccccctgtcagcatggctgagctcagacaggttccaggagggcgggagaccccacagggggagctgcggcctgaagttgtagaggatgaagtccctaggagcccagtcgcagaagagcctggaggaggtggaagcagcagcagtgaggccaaattgtccccaagagaggaggaagaactggatcctagaatacaggaggagttggagcacctgaaccaggccagcgaggagatcaaccaggtggaactacagctggatgaggccaggaccacctatcggaggatcctacaggagtcggcgaggaaactgaatacacagggttcccacttggggagctgcatcgagaaagcccggccctactatgaggctcggcggctggctaaggaggctcagcaggagacacagaaggcagcgctgcggtacgagcgggccgtaagcatgcacaacgctgctcgagaaatggtgtttgtggctgagcagggcgtcatggctgacaagaaccgactggaccccacgtggcaggagatgctgaaccatgctacctgcaaggtgaatgaggcggaggaagagcggcttcgaggtgagcgggagcaccagcgagtgactcggctgtgccaacaggctgaggctcgggtccaagccctgcagaagaccctccggagggccatcggcaagagccgcccctactttgagctcaaggcccagttcagccagatcctggaggagcacaaggccaaggtgacagaactggagcagcaggtagctcaggccaagacgcgctactccgtggcccttcgtaacctggagcagatcagcgagcagattcacgcacggcgccgcgggggtctgcctccccaccccctgggccctcggcgctcctcccccgtgggggccgaggcaggacccgaggacatggaggacggagacagcgggattgagggggccgagggtgcggggctggaggagggcagcagcctggggcccggccccgcccccgacaccgataccctgagtctgctgagcctgcgcacggtggcttcagacctgcagaagtgcgactccgtggagcacttgcgaggcctctcggaccacgtcagtctggacggccaagagctgggaacgcggagtggagggcgccggggcagcgacggcggagcccgtgggggtcggcaccagcgcagcgtcagcctgtagccgaggggccagggttcctggcttgaatctgccaccacgggccggttggggcccacagtcttctcacgccctctcctctggggcctcgtcttcccgaaggtccccttctccagtgcttccctgggagaggccagctgtgttcgagtcctctgtgcctgccctggcgttctcacagcctcccccttcccctcagcaggcggctctctttgccttacccattcagaaggctcgccctcggcgctctgtctgcctctgcctgccagctcatcacgatctgcagggcattgaccctttgctttccctttctgctccctctctttccatctgtttggctttttccctcagggaacttggtctagaaggcactgggaagctcatcagagaaaatgggtgctgggcctgagtactcccgtcggaggggatggacagtcacccctcccgttggtttccagccccgccccccttcccaaggcaactctggagggtaccctaggtatgctgctgagccctgccccccgtcctgctccagcctgcccgtgtgtaacctgtaagatgtactgtgtgcctccggaagacaccacctttcccttcagcattccctttcatgacctgaggcactctgcgatgtgtgccccaaagcagaacttacagggcctgcaggaagctggtgtcagggagagaaacccaaccccactgtcaacatagggagcatcaccaactccagactggctcctgtgggtatggtgtttccgctgggctgggtcctcaacattgccaaggtgctagtgggtccctaagagggcccatgttgggggtgaagtcatgaggtcctgaaggcttaggcccctgtcattcccaccctcactcttgctgcacagttgtgtttactttttctgggtagaggatgctgaactgactcagcaccctcctgcaggacggggttagggaatttggtgctcaattgctctcccttgctcttccccaaactgaaaatacctactgcaggatccctcggggcacactgaagcttggctgccaaccctcttacttcctttgttacagggaggggttggcttggggtgaaaagttctgccctccgcagggagcagctccagctgcctggcagtgctcccagtttgtagggaagccacaccagatctgggtgccttgggagaaccagtccttccttttgacccaccccaggaagatggagtgctcttttctaggcccatgttctgccagcaaccgggatgcgtgggcaactggactctgcacgggggtctacaggttgagggaggttggtcacaatgagaacctcggggtttgaggtggccatgggcagacagccgaaagggagggagggtgtgggtgtgcgtgtgtgcatgtgctggtgtgtaagggggaaagggtctttcctggttttatttaaataaagtagtttatgtaacagtt

SEQ ID NO: 122 - DNA, 6585 bp, Homo sapiens
ccaccctggaaagcaaggacagtggaattatagccacaattacaagttcatccgaaaatgatgaccggagtggctccagtttggaatggaataaagatggaagcctaagattaggggttcagaagggagtgcttcatgaccgcagggcagataactgctccccagtggcagaagaggagaccaccgggtcagcagagagcacgctgcccaaagcagaatcctcagctggagatggtccagtcccttattctcagggctccagctcactaataatgccacggcccaactcagttgcagcaacaagctcaaccaaattggaagatctgagttatttagacgggcagagaaatgctcctctacggacgtcaattagattaccatggcacaatacggccggaggtagggcacaggaagttaaagcacgatttgctccctacaagccacaagacattttgttgaaacccttgttgtttgaagtaccaagcataacaacagactctgtgtttgtgggaagggattggctctttcaccagatagaagaaaacttgaggaacacagaactggcagaaaacagaggcgcggtggtggttggcaatgtgggatttgggaagacggcaatcatttccaagttggtggccctgagctgccacggaagccgcatgaggcagattgcttccaacagcccgggttcatcacctaaaacctctgaccccactcaggatcttcatttcactccgttgctttcaccgagttcttccacaagtgcttccagcacagctaaaacacctcttgggtctatcagtgctgaaaaccagagaccaagagaggatgcagtgaaatatcttgcttctaaggtggtggcctaccactactgccaggctgacaacacgtacacttgcctggtgcccgagtttgtgcacagcatcgcagctttgctctgccggtcccatcagctggccgcctacagagaccttctgataaaggagccccaactacagagcatgctgagcctccgatcctgtgtgcaggacccggtggcagctttcaagaggggagtgctggagccactcacaaacctgagaaatgagcagaaaattcctgaagaagaatacattattttgatagatggcttaaatgaagctgagtttcataaacctgattatggagatacgctttcttcatttattaccaaaattatttctaaatttcctgcctggttgaagttgattgtgactgtaagagcaaattttcaggaaatcataagtgcgctgccatttgtcaagctttccttagatgacttcccagacaacaaagacatccacagtgacctgcacgcctacgtccagcacagggtgcacagcagccaggacatcctcagcaacatctccctgaacggcaaggccgatgccacactcattggaaaagtgagcagccacctggtgctgcggagcctcggctcctacctgtacctcaagctcaccctggaccttttccagaggggccacttggtcattaagagtgccagctacaaggtggtgcccgtgtctctctctgagctctatttgcttcagtgcaacatgaagttcatgacccagtccgcctttgagagggcacttccgattctcaacgtggccctcgcatccctccaccccatgacagacgagcagatctttcaggctattaatgctggccacatccagggggagcagggatgggaagactttcagcagaggatggacgccctctcctgcttcctcattaagaggcgagacaaaacccgcatgttctgccacccgtccttcagggagtggcttgtatggagagcagacggggaaaacacggccttcctgtgtgagcccaggaacgggcacgcgctcttggcattcatgttctcgcgtcaggagggcaagttgaaccgccagcagaccatggagcttggccaccacatcctgaaggcgcacattttcaagggcctcagtaagaagacgggaatttcttcaagccatctccaagccctgtggatcggctacagcaccgaggggctgtccgccgccctggcctctctcaggaatctctatactcccaacgtgaaggtgagccgtctcctgattttgggaggggccaacgtgaactacaggacagaagtgttaaataatgccccaatcctgtgcgtccagtctcaccttggccacgaggaagttgtcactctgctcctggaatttggtgcctgcctggacggaacgtcagagaacggcatgactgccctctgttacgcagcagctgctggccacatgaagctggtgtgtctgctgaccaagaagggagtgagagtggaccacttggataagaagggccagtgtgcgcttgtccacagtgccctacggggccacggtgacattctccagtacctgctgacttgtgagtggtcgccgggtcctccccagccaggcaccctgaggaagagccacgccctgcagcaggcgctgaccgcggcggccagcatgggccacagctcggtggtccagtgcttgctggggatggagaaggaacatgaagtagaagtcaatggcaccgacacattgtggggagaaacagccctgactgccgccgcaggaagagggaagctggaggtctgtgagctgctgctggggcatggagctgctgtgtcgcggacaaacaggagaggggttccacctttgttttgtgcagcacgccaggggcattggcagattgttagactgctgttggaacgcggctgtgatgtgaacctaagtgacaagcaaggccggacgcccctcatggtggctgcttgtgaagggcacttgagcaccgtggaattcctcctttcaaaaggtgcagccctttcttctctagacaaagagggtctgtcagcattaagctgggcttgtctgaaaggtcacagggcagtggtccagtatctggttgaagaaggagctgcaatagaccagacagacaagaatggccgcacacccttggacctggctgccttctatggcgatgccgagactgtgctgtacctggtggagaagggagccgtgatcgagcatgtggaccacagcgggatgcggcccttggacagagccatcggctgccggaacacatctgtagtggtggcgctactcagaaagggagccaagttaggaaatgctgcttgggcgatggccacttccaaacctgatatcttgattatacttttacagaaattaatggaggaaggaaatgtgatgtacaaaaaagggaaaatgaaagaggcagcccagaggtaccagtatgccttaagaaagtttcctcgagaaggattcggagaggacatgagacccttcaatgaattaagggtttccctctatctcaatttgtcgcgatgccgaagaaaaaccaatgactttggcatggcagaggaatttgcttccaaggctctcgaattgaagcccaagtcctatgaagccttttatgccagagcaagagcgaagagaaatagcaggcaattcgtggcagctctggctgacctgcaagaggctgtgaaactctgtcccaccaatcaggaagtcaagaggcttctggcccgcgtagaagaggagtgcaaacaactccagaggagtcaacagcaaaaacagcagggcccgctaccagctccactcaacgactccgagaacgaagaggacaccccaacccctggcttaagtgaccactttcactctgaggagactgaagaggaagaaacttctccccaggaagaatctgtttccccaactcccaggtcccagccatcctcatctgtcccttcctcatacatccgaaaccttcaagaagggttacagtccaaaggaaggccggtatcgccacagagcagggcaggaatcggcaagtccctgagagagcctgtggcccagccagggctgctcctgcagccctccaagcaggcccagatcgtgaaaaccagccagcacctgggctctggccagtcggcagtgagaaatggcagtatgaaagttcagatctcttctcagaaccctcctccaagtcccatgccagggagaatcgctgctgctcctgctgggagcagaacccagcatttagagggaacgggtactttcactacaagagctggttgtggccactttggggatcggctgggccccagccagaatgtccgcctgcagtgtggtgagaatggccctgcacaccctttaccaagtaagacgaaaaccacagagaggcttctgtctcattcctccgtggctgtggacgcagcccctccaaaccaaggtgggctggcgacctgcagcgacgtgcgacacccagcttccctcaccagctcaggctcttctggttctccatccagcagcataaagatgtcaagttcaaccagtagtttgacttcgagcagcagtttttcagatggcttcaaggtccaaggaccagatactagaattaaagacaaggttgtaacccacgttcagagcggtacagctgagcacagaccccgcaacacgccgttcatgggcatcatggataagactgcgaggttccaacagcagagcaatcctccaagccgcagctggcactgtccggcaccagaggggctgctgacaaacacgtcttctgcagctggcctgcagtctgctaacactgagaagccctctctcatgcaagtgggaggatataataaccaagccaaaacctgttctgtttctaccctgagtgcaagtgtccacaatggggcacaagtgaaggagctagaagaaagcaagtgccaaattccagtccactctcaagagaacaggataactaagactgtttctcatctgtaccaggaaagtatctccaaacagcagcctcatattagtaatgaagcccacaggagccacctcactgcagccaaaccaaagcgatcatttatagagtcaaatgtgtgaaccttaagaaagccccatttgtggaatttggaaacgtgtgttgactcctggtggtaaattaaatagtttttttcatcagaaaaattattttttagccattttttttctttggggtggatctgatgccattgatatatctaaaatgtgggataaaacttctttaatagctagaaatcaccataaataagaatgctaaacagaattgaaaattatatcaacttaaaattttaagacagcccagaagacattaatgactctcacttatgaaattgtttggcttttgccactttcctccttgcctttgctatatggtagaatcacagaacttacttagagaataaatatgtctattgttcaagagtaacaggtttaactcatgaccaagtgatgtacatccaagtgatgtattctggaaacgatggaattttacagttacagttccattgagtcaaatcccattttatatatacataaaaattaagttctgagtgagttctagctaaatataagtgcgactgtaaacgcagccaatttttttaagcagaatatgagaacacctaagtattctcttcatagcagttcctataaagggattaaacacttatttctgtgttatggttcttattcatatatttttatagcacctttttttggaacctatatttgtgcttgaaggtgtttttgatatttggaaacagtataagccatttggagtcatgattggtggtcaagtggattcaagctaaaatactaagaccagcattcttagtggcgcttataaattagctctcacctggtttccaaactgcttttaacaatggtagtgctcctggaacaatccttccaagctcctctaaggacaatatttaattcagatactaaaggtaagactggttgttacttttgttttgttgtacaattagtactttatagtcacatgttgtatatattaaatagcccagttttattcagacttgtaaatagaactatttcaatgtagttaatctaaaaacaaaaaagaaaccccagtcacgatttgcatgttctctgtaagcttcatccatgctggttattgcactgaatgatatattattagggcatgttaacagtataccagtaacagcactttatctcatttatatgaacacctttgaggtgctacttaagtccaagctctgatgtattattcatttgtaaagataaggtacaggaatgaaccttggtttaaaggtatttttatatgaaaatggtgtgttattggaagatgttaaagtgctaatttgagagaagtaggagtgtatctgttttatatgttgggatgtgaaatttattttctaaaattgaggagaaggaagttatatatttgcagaatgttttaaagtgaattgttgtaatgaagttcctgtgaacatcattatggttttgtacaaataggaacctctgatgtcattcttcaacgtttgttcctgtgtgtacaattgtactttgtatgaacagctttatcatttttataggctttccatgagttttgctgtaactactatggcttatttattttctttaatatttgtgaaagtcttactcctttgttagttttgtttctgcacaactactgtacttttccatatggaataaagactattaatag

SEQ ID NO: 123 - DNA, 6782 bp, Homo sapiens
cagggggagcaccgagcaccacggtgtcgtgcgcttcgaggcgcggcgtgggaagaaggctggttcattctgccacccctctgcattaagacacaaggtgctgaccgcagagacctgccatgaaaccacacttgaagcaatggagacaacgaatgcttttcggaatattcgcttgggggctcctctttttgctgattttcatctacttcaccgacagcaaccccgctgagcctgtacccagctccctctccttcctggagaccaggaggctcctgccggtgcaggggaagcagcgggccatcatgggcgccgcacatgagccctccccgcctgggggcctggacgcacgccaggcgctgccccgcgcccacccagccggttcctttcatgcggggcctggagacctgcagaaatgggcccagtcccaagatgggtttgaacataaagagtttttttcatcccaggtggggagaaaatctcaaagtgctttctacccggaggatgacgactacttttttgctgctggtcagccagggtggcacagccacactcaggggacattgggattcccttcccccggggagccaggcccacgggagggggcttttccggctgcacaggtccagaggaggcgggtgaagaagaggcaccggaggcagagaaggagccacgtgttggaggagggcgacgacggcgacaggctgtactcctccatgtccagggccttcctgtaccggctctggaaggggaacgtctcttccaaaatgctgaacccgcgcctgcagaaggcgatgaaggattacctgaccgccaacaagcacggggtgcgcttccgcgggaagcgggaggccgggctgagcagggcacagctgctgtgccagctgcggagccgcgcgcgcgtgcggacgctggacggcaccgaggcgcccttttctgcgctgggctggcggcgcctggtgcccgccgtgcccctgagccagctgcacccccgcggcctgcgcagctgcgctgtcgtcatgtctgcaggcgcaatcctcaactcttccttgggcgaggaaatagattctcatgatgcggttttgagatttaactctgctcctacacgtggttatgagaaagatgttgggaataaaaccaccatacgcatcattaattcgcagattctgaccaaccccagccatcacttcattgacagttcactgtataaagacgtcattttggtggcctgggaccctgccccatattccgcaaatcttaacctgtggtacaaaaaaccggattacaacctgttcactccatatattcagcatcgtcagagaaacccaaatcagccattttacattcttcatcctaaatttatatggcagctctgggatattatccaggagaacactaaagagaagattcaaccaaacccaccatcttctggtttcattggaatcctcatcatgatgtccatgtgcagagaggtgcacgtgtatgaatatatcccatccgtgcggcagacggagctgtgccactaccacgagctgtactacgacgcagcctgcaccctcggggcgtaccacccactactctatgagaagctcctggtgcagcgcctgaacatgggcacgcagggggatttgcatcgcaagggcaaggtggttcttcctggcttccaggcggtgcactgccctgcaccaagtccagtcattccacactcttaaaaagggtttcttgggaatcaatgtgcaataaggtactactgttgtactcaaagtcacaaaagaatacttgaagatagattttagacagtgtagttttgagtctttaaacagtaatttagtggtggtcatgataatccttctctttctaagccattgagtatgtattactgctttgaacatagaaatggtttttttaaaaaaataaggctcaagaaagatgcaaaaccaaggatagctagaaagaaaacacatgtatgaccatgggtatgatacctccagaaatgttaacaacttattcttctgccatgagtacccctcatcagggttggtttcaatgacaggttttggtgatgttcctgaccatatgaagtggtttatgtttagaaacattcaaattgagggacatcatttacagcatcgagtgtgtcagttatacatgcattcatcattaaatatcctaggttttatgacagacattgaaattatcactcagatgtgtttaacagcaaaaaattcccagcacatcctggcaaaggcttttatttccaaccgttgcattcttcatctctgcctcccattgcccactgaatgctttgctttctgtgcatcaagacagagttctaaaaccagaaaacatccatcttgaaaggtccaagaaaaagccaaattccatatagcaccacagaggaggccctttgtttccctgcagtatttcaaccaggaacattagtatcacatccaccaggaggcacatcactggcaagtaacatagaatcacagggctgcaggtgcccctggacactccccggttctggcttttctgccttgtacctcctcacctgcagatctaccctgcagcttttgcatagtcagtgacacacttgacaattggcacagctgtgctggggaagacgggagacaccttgctccttccaaactagaaggaaagattttggagccatcaccctgtgcttctagggatgcacgcctgtctttattatacaggtttcttgcaggtttttatcagccagtgggaactccacagtgatgagcactgaatcttcactaaatcttcctacagacatttaggaatccagtccttgcttttgcagatatgttttatgtcagcagcatgacaaagccatataattaaataatttatgtgaaagcattgcttattaacaaggaaaatatgtagatgcttcagagggaaaggcagctagagggaaattttcatcccaatatgttagctatattcagggttgattttttctttaatctcaactgtcactgatacattgaaaaatttttgctatgaatatagtgaaacagaaacattctgtaataccttaattaaacatgctattatttcaatgtataaccaaaacatatctccatggtacagttaagacttgttgcaatgacaatagcagcttaattaaatgcgttctcccttgcaaaatgtatgaatgtcaggagagtttagtggaaaagttttctttgtttcaggattggtttcttctagactgttctcaggactactttcttgagcaagaatggcttacagagactgaaggcttctgtttggttagtctattcagcagatatggagctggaaaacaagacatctcctatagcttgctataatagtgaaggagaaattggaaagttttaatcacaataatatccaataaaagcccattttgagagttttgttattaagtcaatgagaagggataggtaactttgtcctatatattaacttatgtctaaatagacatggttaagccatgttcctttctaatttcttttcttttcttttttttttttttttttttgagacagtctctcgctctgtcgcccaggctagagtgcagtggtgcgatcttggttcactgccagctctgcctcccacgttcacaccattctcctgcctcagcctcctgagtagctggggactacaggcacctgccaccacgcccagctaattttttgtatttttagtagagacagggtttcaccgtgttagccagggtggtctcgatctcctgaccttgtgatctgcctgcctcggcctcccaaagtgatgggattataggcgtgagccaccaccgcgcccggtcattcctttctaatttcttgaaaaaactttgtcttgtccttatgtttacatgtgtgtaataatttcagcaactctggaatgtgggtgaggtggctgtggtggatgaatattactccctaccctccttggatctttctagatcttccagaccattaaatgcccctgaagctccttttatagttttgcaagtggatttacttgtagacatccttactatccagcataatcccccttggctgacatgagaacttggttagaggagaatttattggggtcagtgtaaatattcaagttcaaaagcctcagaacccaacactttaaagatttttaaatggaattttgtcgtagtcattgtacttttaaaatagtactttcagtttcattgaggttacaagaaagactgaagagtacaaaggaaatttagttacaatttttgcatttattatggccttaaagactcttgggaatcaggctctgttcaacagtcaataaatgtaatacacacattaatatagtactgactgggcgttcttctataaaagtttaagttctttggcttctaagaaaatgttgggcagttacagttaacttgatgactacttctggtattagccaaatgggtcctaagtggcagcattttgccagacattgactaaatccttacatgccacatttactgaattccaataaacatatagttcttctgtggagtagttaacagtaagtggcagctcactgaatttctcccaggttctgtctcttccaaaatcctccatcctctcttatgaagggaagctgataaaaaaaaatcctcttggtgcaagctgaagctgttaaggattccttttttcactctcaggaccaacagacattcttttgtatttcaagataatttcacctgttgttgttgttgttgttgttgttgttgttgttgttgttgttacaaagaaacaaattttgagcagcaatgacaattcaaccatatctagattctccctaccttatttctccagccagtcacaccaggcagacgggtaacctttaacagacctggtgttctcatggaataccgatgctcgtcccagggagctgacctttctcactatgtccttatagagctgctcttacagagaactttgtgctcaggaccaagggatggtcaattaaaagttgcatgtaagcatcaggcttggatgggcaagggagggcttttatacatctttgaacgaccaggtctttccttgtctgcctgaaggcagagcttcgagaaacagcacttcccatgtgtctggtcctcttggtctctcagccagacacttaatcaatcctggactctccagtagtcctcagtcattgtagccatagcatctgcaaaaaaagaaatgctaaaataatcattagcgttttcaaaattaggaaatcaaagtagctgggtcactctcttacatgtgtatgagccagttaattctgctggacagatcatacttacgctgctgattgactcttctgagcagtaacacatctcctgaattaattaggtaggtcccgtttgggtgctttaagtgggatcagtcttagatgagtgccagtatgtgattgaatttcatacgcacaaatgccatgattcaagttctctctccagtttttcttatagatcaacacacagtacatgtggtcagttacttggttgaatttctgcttagctgtggtaagagacagagaaagggagtgaggtgggaccaggggaattatcagaaagacatgagtgaacctattggccaggtagcttccaagtatgttctattgtattgtctgttttgattctgatagtttagaactctttctgatagtttagaactcttacccagtggttacatgactgatcaaggcaactccatctggaaattaattgcttgggtaaaatgtccctgagtttcaacttgtcttttatctctggatattctcttatgagattattatgcatgtttctgtcacatgggcattatttacacacttgataaatgaaaggtatttctctgtccgttcaaggaaataaaatgtaagttcttgttttattaaatgaatgaagccttttggttaaaaaaaaagtaatgtaatatgtttctgttcaaacttgagctaatgacatttaaggaattaaagacattgatctagttcttagtatgaaaagtgtacatgtagatatagttatataattgtgtatatacatatctacacacatggttggttttatattgctttttcatcaatatttttgactgaaacctttacaataaattttattttaattatgtaaccactaatattttgagagaaggaagcaaatgttatatgtccttctgttaaaagaaaaaaaattcagtcctccgccaaccgcttcccacacactcatactctgcacatcttggctacattaaaatggactgacagaattatttaaaaggcactatgaaggtagaacactaccttaatattttatcctagtcagaagcctgatttaacactgaactttgaagggaagcttagctgtagctcatggctttcaaagattagaagaaacatttactggttctatggaaaatagtcttcttgctaggtagattggaaacaaagaaattgcattggtggtgttaaaatctaacatttataacaaatcctgttttattctagatgaaatacttagacaattcttccagtggaaaccagtgaacttttttaacagctttgggaattcttttgtatgataatttttaaaatgaaatgtgtactcttcaaactaattaaagcttgaagttttccaggagtcgcattttaaaagtgtttgtacacattttaacacttggatattttctattttggttttgtatatttttatgtatacacaatgtacagacttttttcttgtaaataaaacatgttttcatttgtct

SEQ ID NO: 124 - DNA, 6473 bp, Homo sapiens
ggacactcaccagccctcgctcaggcacctgctcacacggccagaggtcatcacggccctcagcaaggtgagggccgagtgcaacaaggtgaccgccatgtccctgttccactcgagcctctccaagtacagccacctggaggaatttgagcagatccagtcacagaccttctcccaggtgcagatgttcctcaaggacagctggatcagctcgctaaaggtggccatgcgcagcagcctgcgcgacatgagcaagggctggtacaacctctacgagaccaactgggaggtgtacctcatgtccaagctgcgcaagctgatggagctggtgaagtacatgctgcaggacacactgcgcttcctggtgcaggactcacttgccagcttctcacagttcatcagcgacacctgttgcagcgtgctcaactgcaccgatgacatggtctggggtgacgacttaattaacagcccctacaggccccggaagaatcccctgttcatcatggacctggtgctggacagctctggggtgcactatagcaccccactggagcagtttgaggcatctctgctgaacctcttcgacaagggcatcctggccacccatgccgtgccccagctggagaagctggtgatggaggacatcttcatcagcggtgaccccctgctggagtccgtgggccttcatgagccactggtggaagagctacgggccaccattgccagtgccgtgtccaaggccatgatcccactgcaggcctacgccaaggagtaccgaaagtacctggagctgaacaacaatgacattgcctcctttctcaaaacctaccagacgcagggcctgttggcccaggaggtgcgggaggtagtgctcacccacctgcgggagaaggagatcctggacagctcgctgcccagcagcatcatcattgggcctttctacatcaacaccgacaatgtcaagcagagcctgtccaagaaacgcaaggccctggccacttccgtgctggacatccttgccaagaacctgcataaggaggtggatagctcctcagcaacccagggagcccaccaggagcacccctcttggaaagcgccgcaggatgttgtggtggaggggacagttacctgtcgggagatgctggagaccaaggaggaagagcaggtgagggaaggcaagggagcagcatgctgccctccccagcgcctcctcccactgccagatctgcgaggagttccgcagcatcagccgcaagatctatgagaagcccaacagcattgaggagctggctgagctgcgagagtggatgaagggcatcccggagaggctggtgggcctggaggagcggattgtgaaggtcatggatgactaccaggtcatggatgaattcctctacaacctcagctcagatgacttcaatgacaaatggattgccagcaactggccttctaagatccttgggcagatagagctggtgcagcagcagcatgtggaggatgaggagaagttccgcaaaatccagatcatggatcagaacaacttccaagagaagctggaagggctgcagctggtagtagctggcttctccatccatgtggagatttcacgtgcacacgagatcgccaacgaggtgcggcgtgtcaagaagcagctgaaggactgccagcagctggccatgctctacaacaaccgcgagcgcatcttcagcttgcccatcaccaattatgacaagctctccaggatggtgaaggagttccaaccctacctggacctttggaccacagcgtctgactggctgcgctggtcggagagctggatgaatgaccccctctctgccatcgatgctgagcagctggagaagaacgtggttgaagccttcaagaccatgcacaagtgcgtgaagcagtttaaggacatgccagcctgccaggaagtggccttggacatccgggcccgcatcgaggagttcaaaccatacatcccactgatccaggggctgcgcaaccctggcatgcggatccggcactgggagacactgtccaaccagatcaacatcaatgtcaggcccaaggccaacctgacctttgctcgctgcctggagatgaacctgcaggaccatatcgagagcatcagcaaggtggctgaggtggctggcaaggagtacgccatcgagcaggcactggacaagatggagaaggagtggtcgaccatcctgttcaatgtactgccctacaaggcgacagacacctacatcctgaagagcccggacgaggcctcacagctgctggacgaccacatcgtcatgacccagaatatgtcattttcaccctacaagaagccctttgagcagcgcatcaactcctgggagaacaaactgaagctgacccaggaggttctggaggagtggctgaactgtcagcggtcctggctctacctggagcccatctttagctctgaggacatcaaccagcagctgcctgtggagagcaagcgctaccagaccatggagcggatctggaagaagatcatgaagaatgcctacgagaaccgggaggtgatcaatgtgtgttccgacctgagaatgctggacagcctgcgggactgcaacaagattctggacctggtgcagaagggcctcagcgagtatctggagaccaagaggagcgccttccccagattctacttcctgtcagatgatgaactactagagatcttgtcgcagacaaaggaccccacggccgtgcagccacacctgcgcaagtgcttcgagaacatcgctcggctgctattccaggaggacctggagatcacgcacatgtactcagccgagggggaggaggtacagttgtgcttctccatctacccctccagcaacgtggaggactggctgcgggaggtggagcgcagcatgaaggccagtgtgcacgacatcattgagaaggccatcagggcctaccccacgatgcccaggacccagtgggttctgaactggcctggccaggtgaccatcgctgggtgccagacctactggaccatggaggtggcagaggctctggaggccggcaacctcagaagccaactgttcccccagctctgccagcagctcagtgatctggtggcccttgtgcgggggaagctgtcccgcatgcagcgggcagtgctgtcagcgctaatcgtcattgaggtccatgccaaggacgtggtgagcaagctaatccaggagaacgtggtcagcgtgaatgacttccagtggatctcacagctgaggtactactggacaaataatgacctgtatatccgtgctgtgaatgctgagttcatctatggctatgagtacctgggcaacagtgggaggctggtgatcacgcccctcaccgacaggtgctacctgacactgaccggagctctgcacctcaagtttgggggtgccccagctggcccagctggcacaggcaaaactgagaccaccaaagacctgggtaaggccttggccatacagaccgttgtgttcaactgctctgaccagctcgacttcatggccatgggcaagttcttcaagggcctggccagtgctggggcctgggcctgcttcgacgagttcaatcgcatcgacatcgaggtgctgtctgtggtggcgcagcagatcaccaccatccagaaggcgcagcagcagcgggtggaacgcttcatgtttgagggtgtggagatcccactggtgccatcctgcgcagtgtttatcaccatgaacccgggctacgctggccgcacggagctgcctgacaatctgaaggcgctcttccgacccgtggccatgatggttccagattacgccatgatcactgagatctccctctattcctttggctttaatgaggccagtgtgctggctaagaagatcacaaccaccttcaagctgtcttctgagcagctcagctcccaggatcactatgacttcgggatgagagccgtgaaaactgtgatctcggctgctgggaacctcaagcgagaaaaccccagcatgaatgaggagctgatctgcctccgggccatccgtgatgtgaacgtgcccaagttcctgcaggaggacctcaagctcttctctggcatcgtgtccgacctgtttcccaccatcaaggaggaggacacggactacggcatcctggatgaggccatccgcgaggcctgcaggaacagcaacctcaaggatgtggagggcttcctgacaaagtgcatccagctctacgagaccacggtggtacgacacggcctcatgctcgtcgggcccacaggctccggcaagagtacttgttacagagtcctggcagctgccatgacgtcactgaaagggcagccatccatcagtggtggcatgtacgaggctgtcaactactacgtgctcaaccccaagtccatcacgatgggccagctgtacggggagtttgacctcctcacccatgagtggacagacgggatattctcctcgttcatccgggcgggggccatcacctccgacaccaacaagaagtggtacatgttcgatgggccggtggatgccatctggattgagaacatgaacacggtgctggatgacaacaagaagctgtgcctcagctctggggagatcatcaagctcacagaggcaatgaccatgatgttcgaggtgcaagacctggcggtggcttcaccagctacagtctcccgctgtggcatggtgtacctggagcccagcatcctggggctcatgcccttcatcgagtgctggctgaggaagctgcctcccttgctgaagccctatgaggagcatttcaaggccctctttgtcagcttcctggaggaatccatctccttcgttcggtcctcagtgaaggaggtgatcgcctcaaccaactgcaacctgaccatgagcctcctcaagctgctggactgcttcttcaagccctttctgcctagagagggcctcaagaaaataccctctgaaaagctgagtcgcatcgtagagttgatcgagccctggttcatcttctccctgatctggagcgtgggtgccactggggacagcagtggccgcaccagtttcagccactggctaaggctcaagatggagaacgaacagctgactctgcttttcccagaagaggggctggtgttcgattacaggctggaggacgcgggcatcagtggcaccaacgacagtgaggatgaagaggaggaatacaagcaggttgcctgggtgaagtggatggactcctcagctccattcaccatggtaccagacaccaactactgcaacatcattgtgcccaccatggacaccgtgcagatgtcccatttactggacatgctgctcaccaacaagaagcccgtgctgtgcattgggccaacaggcacggggaagacgctcaccatctctgacaagctcctcaagaacctggcactggattacatcagccacttcctcaccttctcagcccgcacttcagccaaccagacccaggacttcattgacagcaagctggacaagaggcggaagggtgtgtttggaccacctctggggcgcaactttatcttcttcatcgatgacctgaacatgccggccctggagacctacggtgcacagccacccatcgagctgttgcgccagtggatggaccacggcggctggtacgaccgcaagatcattggtgccttcaagaacctagtggacatcaactttgtctgtgccatgggccccccgggtggaggcaggaacaccgtcaccccgcggctgatgcgtcacttcaactacctgtctttcgctgagatggacgaggtcagcaagaaacgcatcttctccaccatcctgggcaactggttggatggactccttggagaaaaaagctaccgggagcgtgtgcctggggccccccacattgcccacttcacggagccccttgtggaagccaccatcatggtgtatgcaaccatcacctcccagctgctgcccactccagccaagtcccactacaccttcaacctgagggacctctccaaggtcttccaaggcatgctcatggctgacccggccaaggtcgaggaccaagtgcagctgctgcgactgtggtatcacgagaactgccgcgtgttccgggaccgactggtgaatgaggaggaccgcagctggttcgaccagctcctcaagcgctgcatggagcagtgggaggtgaccttcaacaaggtctgccccttccagcccattctttacggggacttcatgtcaccaggctccgatgtcaagtcctacgagctcatcaccagtgagagtaagatgatgcaggtgatagaggagtacatagaggactacaaccagatcaacacggccaagctgaagctggtcctcttcatggacgccatgagccacatctgtcgcatcagccgcaccctacgccaggcgctgggcaatgcactcctgctgggcgtgggtggcagcggccgc

SEQ ID NO: 125 - DNA, 5073 bp, Homo sapiens
cgcctccccgcgcctcgttcgccgccgctgtcgccgccgccgcccgagactcgcgcagagcagttatggcggatcccgcagcccccacgcccgcagctcccgctccagcccaggccccggctccagccccggaggcagtcccggccccagccgcagcccccgtcccggcgccggcgcccgcctcggactcggcctccgggccgtcctcggacttcggcccagaagccggctcgcagcgcctgctgttttctcacgacctggtgtcgggccgttaccgtggctccgtgcacttcgggctggtgcgcctcatccacggcgaggactcggactcggagggcgaggaggagggccgcgggagctcggggtgctccgaggccgggggcgcgggccacgaggagggccgggccagccccctgcgccgcggctacgtgcgcgtccagtggtacccggagggcgtcaagcagcatgtgaaggagaccaagctgaaactagaggaccgttctgtggtgccccgagatgtggtccggcacatgcgatccaccgacagtcagtgtggcacggtgatcgacgtcaacatcgactgtgccgtcaagctcatcggcaccaactgcatcatctatcccgtcaacagcaaggacctgcagcacatctggcccttcatgtatggggactacattgcctatgactgctggctggggaaggtctacgacttgaagaaccagatcatcctgaagctatccaacggcgccaggtgctccatgaacacggaagatggcgccaagctctacgacgtctgcccgcacgtcagcgactcgggtctcttcttcgatgattcctatggcttctacccaggccaggtgctcattggccctgccaagatcttctccagcgtccagtggctgtcaggtgtcaagcccgtgctcagcaccaagagcaagttccgagtggtggtggaagaggtgcaggttgtagagttgaaagttacatggattaccaagagtttctgtccagggggcacggacagcgtcagccccccaccctctgtcatcacccaggaaaacctaggcagggtgaagcgtctcggatgctttgaccatgctcagcggcagcttggggagcgctgtctgtatgtcttcccagccaaggtagagccagccaagattgcctgggaatgtccagaaaaaaactgcgcccagggggagggctctatggccaagaaggtgaagcgcctgttgaagaagcaggttgtgcggatcatgtcatgctccccagacacccagtgttcccgggaccattccatggaagacccagacaagaagggggaatccaaaaccaagagcgaagcggagtctgccagccctgaggagacgcccgatggctctgccagtccagtggagatgcaggacgagggtgcagaggagccccacgaggcaggagagcagctgcccccattcctgctaaaagaaggcagagatgacaggctgcactcggcagagcaggacgcagatgatgaggctgctgatgacacggacgacaccagttcggtgacctcctctgccagctccaccacttcctcccagagcggcagcggcacgagtcgcaaaaagagcatccccttgtccatcaagaacttaaagcgcaaacacaagaggaagaagaataaaatcactcgagacttcaagccaggggacagggtggcagtggaggtggtgaccacgatgacctcagccgacgtgatgtggcaggatggctccgtggaatgcaacatccgctccaacgacctcttccctgtgcaccacctggacaacaacgagttctgccctggagacttcgtggtagataagcgagtccagagctgtccagaccctgctgtctacggtgtggtacagtctggggaccacatcggccgtacctgcatggtgaagtggttcaagctgaggccgagtggggacgacgtggagctgattggagaagaggaagatgtgagtgtttacgacattgctgaccaccctgactttaggttccgtacaactgacatcgtcatccgcatcggcaatactgaggatggggctcctcacaaggaggatgagccatcggtgggccaggtggcccgtgtggacgtcagcagcaaggtggaggtggtgtgggctgacaactcaaagaccatcatcctgccccagcacttgtacaacatagagtctgagattgaggagtcagactacgattcggtagaaggcagcaccagcggggcatcctcggatgaatgggaagatgatagtgacagctgggagacggacaatgggctggtggaggacgagcaccccaagatagaggagccccccatcccacccctggagcagccggtggcccctgaggacaagggagtggtgatcagtgaagaggcagccacagctgccgtccagggggctgtggccatggctgcccccatggccgggctgatggagaaggctggcaaggacgggccacccaagagcttccgggagttgaaagaggccatcaagatcctggagagcctcaagaacatgactgtggagcagctgctgacgggctcgcccacctctccgactgtggagcctgagaagccaactcgggagaagaagtttctggatgacatcaagaagctacaggaaaacctcaagaagaccctggacaatgtggccattgtagaggaggagaagatggaagcagtgcccgacgtagagcgcaaggaggacaagcccgaggggcagtcacctgtgaaggctgagtggcccagcgaaaccccggtgctgtgccagcagtgtggcggcaagcctggcgtcaccttcaccagcgccaagggcgaggtcttctccgtactggagtttgcaccctcaaatcattcttttaagaaaattgagttccagcctccagaagccaagaagttcttcagcacagtgcggaaggagatggcgctgctggctacctcactgcctgagggcatcatggtcaagacttttgaagatagaatggacctcttctcagctctcatcaagggccccactcgaaccccctacgaggatggcctctacttgtttgacatccagctccccaacatctacccagccgtgcccccccacttctgctacctctcccaatgcagtggccgcctgaaccccaacctgtatgacaatgggaaggtgtgtgtcagcctcctgggcacctggattggaaaggggacagagaggtggacaagcaagtccagccttctccaggtgctcatctccatccaaggtctgatcctggtaaatgaaccatactacaacgaagccggcttcgacagtgaccgaggcctgcaggaaggctatgaaaacagtcgctgttacaatgagatggcgctgatccgcgtggtgcagtccatgacccagctggtgcggcggccccccgaggtctttgagcaggagatcaggcaacactttagcactggtggctggcggctggtgaaccgtatcgagtcctggctggaaacccatgccctgctggagaaggcccaggcactgcccaacggggtgcccaaggccagcagctcgccagagcccccagctgtagccgagctgtcagactccggccaacaagaacctgaggatggagggccagccccaggagaggcctcccagggctcagactcagagggcggtgcccagagcctggcctcagctagcagggaccacacagaccagacttcggagaccgcaccagacgcatcggtgccacccagtgtgaaaccaaagaagcggagaaagagctaccggagcttcttacctgagaagagtggctaccctgacatcggcttccccctcttcccactttccaagggtttcatcaagagcatccggggtgtcctgacgcagttccgggctgccctgctagaggcaggcatgccggagtgcacagaggacaagtagctgccaggcacagaggaaagagcatcaccgtgggagaggccagccgccgcctgctcactcccccccggaatcacccctcttcccatgcccctctgtccccactgcaaacccactgccctcttctccccaaggtgagtttgatgctgaagtgcaagaagtgtgttgagatgctgccgtttctattttgaagcgagctttcaacaggcgggtcccctgtggcaaagaaaatcggaaccctgttgccgattttccatttgtcaccccagcagaatgtccggcacttgctcccttgctgccccttctcaggtcagaggcgggtgttccagggcctgccgcggggctctctgggccggttccctgcagacccgcaggagagcacatgtgccttgcatgaagtgtgggttgcgccaacaattcccctggtccctttcaacctgtttagttcaactcaagcctccctgtgtcccagaccctcctgctgccaccaccacccaggtcctccctagtcctccagcgtcaacactatcccttgggagttgtagctgctgtcactgactcccggctatacatggcctgtcgaccacgttatagccctcaggcctgttgaacttgctctctaagagaggttgggaccaggctaggttccgggtgacgcccaggagaggtggtggccttcacacatgcacatggagttgaggaccagggagctgcagggaaagcaacagctataggtgccttgctcttctgtcggaggctgctgggggcaagagcagctgcacaaggccagggcaagtgctagggcccctcccccatcacatggtcacactgggacaggcgtgcagctcactgaactccaagcgagccagccctctcttggactagaaggcctactgtcagcccttcgcttacaaactgcaggctcaatccgaaggggacggccggcgggggctctcctagtgcccagagacaggcccagaggtttacaagttttctaagcttttgataatgtgaagctccaggccgagaggatgctgttgagcacattgcagctatgtaatttttggtgtatgtatgtaatatttaaggttggaaaaaaaaactcaaaagcaaagatattaactcttattag

SEQ ID NO: 126 - DNA, 4105 bp, Homo sapiens
ggagagtgggccttaccagaagaaatggttgacaatttaccaccctccaacaattgcatactgggccatattcttcacaggctagctgaaaaatctcttcctcctcgagcggaatcaacaacacctgaattaccttcatttgctgttaaaggatgcttattggggaaaacattaagtggaaaaactaccattttaaggtctctacaaaaagactttcctatacagatactttctattgacactcttgtccaagaagctatccaagcatttcatgacaatgaaaaagtcagtgaggttctaccaattcagaaaaatgatgaagaagatgctctaccagttctgcaagaggagattaaagaaagccaggatccacaacatgtattttcagctggtccagtttcagatgaagtattaccagaaacagaaggtgctaatgctgataaaacaccaaaagctgaagaagtcaaatcaagtgatagtttcttaaaactcactacacgtgctcagcttggtgcaaaatcagaacagttgctgaagaaaggaaagagcattcctgatgtgctgcttgttgacatcatagtaaatgctattaacgagatacctgtgaatcaagactgtatcctagatggttttccaatgactttaaaccaagcacagcttctggaagaagctcttacaggctgcaatagaaacctcacagaagtggaaagaaaaaaagcacaaaaatccacattggctattgatcctgcgacttccaaagaaatacctcttccctctcctgcatttgattttgtcatattattagatgtttcagatacttcctcaatgagtcgcatgaatgatattatagctgaagaattgtcctataaaactgctcacgaagatatcagtcaacgtgtagctgctgaaaaccaagataaggatggagaccaaaatttaagagaccagatacaacatagaattataggcttcttggacaactggcctttattggagcaatggttttcagagccagaaaatattttgataaaaatcaatgctgaaatagataaggaatctttatgtgaaaaagtaaaagaaattcttacgactgaaatagcaaaaaaaaagaataaagttgagaagaaattagaagaaaaggaagctgagaaaaaagcagcagtttccctggctgagcttccacttcctacacctcctcctgctcctcctcctgaaccagaaaaagagaaggaaattcatcaaagccatgtgccttcaaaaactcctactgcaaaaggaaaacctcaatcagaagccccgcatggtaagcaagaatctcttcaggaaggaaaagggaagaaaggtgagaccgcactcaaaagaaaaggttctcctaaaggaaaatcatcaggaggaaaagtaccagtaaagaaatcacctgctgactctacagatacatcacctgttgcaatagtgccacagccacctaagccaggatcagaagaatgggtctatgtgaatgaaccagttcctgagaacaagtttccaggagtttctaaagcgtccggatcacaagcaagattttgtagctcaatggcaggctgatttcaactcccttcctgatgacctgtgggatgatgaggaaacaaaggctgaactacatcaacgagtgaatgatctgcgagaccgcctgtgggacatttgtgatgcccggaaggaagaggcggagcaggagcggcttgacatcattaatgagagctggttacaggacactcttggaatgacaatgaaccatttcttttccctgatgcaggcagagctgaaccgtttccaagatacaaagagactccttcaagattattactggggaatggaaagtaaaatcccagtagaggacaacaagagatttactcgaatccctttggtccaactggatagtaaagacaattctgaaagccagcttagaattcctctagttcctcgaatatccatttctctggaaacagttacacccaaaccaaaaacaaaatcagtactgaagggcaagatggataactccctagaaaacgttgagtccaactttgaggccgatgaaaagttggtcatggacacctggcagcaggcttctttagcagtatctcacatggtggctgctgaaattcatcagaggcttatggaagaagaaaaagaaaaccagccagcagaccccaaagaaaaatctcctcagatgggtgcaaataaaaaagtcaaaaaggagccacccaagaaaaaacaggaagacaaaaaacccaaaggtaaatcaccacctatggcagaagcaactcctgtcatagtaacaacagaggaaattgctgaaatcaaaaggaaaaatgaactgagggtcaaaataaaagaagaacaccttgctgccttgcaatttgaagaaatagccacgcaatttcgacttgaactgataaagacaaaagcattggctcttcttgaagatttagtaacaaaggtggttgatgtatataaactcatggaaaaatggcttggtgagaggtatttgaatgaaatggccagtacagaaaaattaactgacgtagctcgctatcacattgaaacatctacaaaaattcagaatgaactttatttaagccaagaagacttcttcattaatggcaatataaaagtcttcccagatcctcccccatcaatacgtcctccacctgtagaaaaggaagaagatggtaccctgaccattgaacagcttgacagtcttcgagatcagttcttagatatggcacctaaaggcataataggaaataaagcatttactgacattctgatcgatttggtgaccctgaaccttggcacaaacaactttcctagtaattggatgcaccttacccaacctgaattacaggaattaacatctttattaacagtcaactccgagttcgtggactggcggaagttcctgttagtaacctcaatgccttggcccattcccttggaggaggagctccttgagacccttcagaagttcaaggctgtggataaggagcagttgggcaccatcacttttgagcagtatatgcaggctggtctgtggtttacaggagatgaagatataaaaattccagaaaatcctcttgaaccccttccatttaataggcaggagcatcttatagagtttttctttaggctatttgctgactatgagaaggatccaccccagcttgactacacacagatgctgctttactttgcttgccacccagacaccgtggaaggagtctacagggccctcagtgtggctgttggaactcatgtcttccaacaagtcaaagcttccattccaagtgcagaaaagacctcctcaactgatgcaggtccagctgaggaatttcctgaacctgaggaaaatgctgcaagagaagaaaggaaattaaaagacgacacggagaaaagggaacagaaggatgaagaaatccctgaaaatgcaaacaatgaaaagatgtccatggaaacactactcaaagtgttcaaagggggaagtgaagcacaggactccaatagatttgccagccacctaaagatagagaacatttatgcagagggcttcataaaaacatttcaagacctaggtgccaagaacctggagccaattgaagtcgctgttctcttgaagcatccttttattcaagacctgatttcaaattattcagactataagtttcctgtacacatcatctatgtagtggaaatgatagtgtgtgcaaaaggttgggcaccacttccatcaggaaaacagtgtgcaagatggagaaactaaggacaaaccccagagaaactggacaaacccagcagaagaaaggaagaactgcaactcagaaatcacataaccaccaagcaggtctggaccacacatgctaaatgtgcatccactatggcgagtcccaggcctttaacagcagggactaaggagggcagaggctgacaccaaccccctttcatactgtagcactacatccctctcagataccagtttaacacgaagtctccctgtttgactcctgtgagttgtgtattgaactacaaagtgtttgctgagttgaaaataaaagcgctttcactttgatag

SEQ ID NO: 127 - DNA, 4328 bp, Homo sapiens
aagattatagagacttgctttagaaccacaagaagaaagaggaggccggcttttcagctagcatcatggcgtggccgtgcatcacgagggcctgctgcatcgcccgcttctggaaccagttggacaaagcggacatcgctgtgccgctggttttcaccaagtactcggaggccaccgagcacccgggcgccccgccgcagccaccgccgccgcagcagcaggcgcagccggcgctcgcgcccccctcggcgcgcgcggttgccatagagacgcagccagcccagggcgagttggatgcagttgcccgggcaacggggccagcgcctgggcctaccggcgagcgcgagccggcggcgggccccggccggagcgggccgggcccgggcctgggctccggctccacctccggccccgcggactcggtgatgcggcaggattaccgagcctggaaggtgcagcggcccgagcccagctgccggccgcgcagcgaataccagccctccgacgctcccttcgagcgcgagacccagtaccagaaggacttccgcgcctggccgctgccgcgccgcggggaccacccgtggatccccaagcccgtgcagatctctgcggcctcccaggcgtcggcgcccattctcggggcgcccaagcgccggccgcagagccaggagcgctggccagtgcaggccgccgctgaggcccgggagcaggaggcggcccccggcggagcgggtggcctggcggccggaaaggcgtccggggcggacgagcgcgacacgcgcaggaaggccgggcctgcctggatggtgcgccgcgccgagggcctggggcacgagcagacgccgctgcccgcggcccaggcccaggtccaggccaccggccccgaggctggcagggggcgcgccgcggcggacgccctcaaccggcaaatccgcgaggaggtggcgagtgcagtgagcagctcctacaggaatgaattcagggcatggacggacatcaagcctgtgaaaccaataaaggccaagccccagtacaagcccccagatgataagatggttcatgagaccagctacagtgctcagttcaaaggagaggccagcaagccaacaacagctgacaataaggtcattgatcgcagaagaatacgcagcctctacagcgaacccttcaaggaacccccaaaggtggaaaaacctagtgttcagagttccaaaccaaaaaagacctcagcgagccataagcccacgaggaaggccaaagacaagcaggcggtgtcaggccaggctgccaagaaaaagagcgcggagggcccgagtaccaccaagccagacgacaaggagcaaagcaaagagatgaacaataaactggctgaggcgaaagagtaaatttccctgcactttccttttactcttctctctctctccctccccccaactttttttttttaaaccaacaaaccaaaaaaggccacaaaattaattagaggcttctcatctgccttggtcctgagtgttccaggagctctttggtttggcttcttttgatggaagaatcctgcttcacagactgagtggcaggcctcctcctgagggcagcccctggagcaccaggaagcgttgccgctggctgtgccctcccctggcactctgactgcatgctgatgagcaaggcaggcaggtctgagaggcgaaacgaatctcccggcagtgcttggaagtgtctgtggggtctcctcctcccagatccccaagatctgtgtcactggtcgattttgaactttaggtacatgtgttcttttcaaaaattcagagaatcgtcatgtgccacagaagctcagcctgggcttcagcaattgacaaaatttgaagaaatattaaacaaaaataacaaaaaaagaaacaaccttggccttaatgtcaataaaagggagttgtgtctgttaagtggtcttttcatagaatcgtccattagaaatgtgtgcctgtgtttagcttcctatcagtgggctttaaattgtataccgagtcatagatacgccactgataactaaaactagatcagggctggtgaagaaggttaggtgttttaggtacattccagctgtcataggaagatcacagaaatgaggaggctgttttcctctgattctcctcggccgaccacctgtccaatgctgctggtttcgcagagcgaccggttggagatgtctgaggaagaaagttcaaggtgtagggatagtgtgtttggaatttgactttccatttctgagacccaagggggcgtagatgtagtggcaagtgtggcgatgtttactctcccttcctgaaccgctctggtctgctcctcagagagggcagcggtgccaggcctcaggtcagggagaatgtctgtgacttagctgcagactaggagactgccctgctaactaattagcaagcagctttgacctcattaatatataaaagcagctctcagtatattccgtgtcgtgtgtgtgtgtggccaaagcccccaagggtggcaagtgccaccttcgctgtgctagagttgtgttgtaggaattagtcagggagttgttgtgaaaaaaaaaaccccagtgcttgtgagggaactcaaaatagttaccagaaaaataatatttgccaatatgacgtgtatattgctcagcacactctgtatctcctgtccttaaaatcctcttgtccccggcattctgacacactgggctgccgtccggtgtcaagccccggcgcaggcttgctcttcttttacaatgaaaggggtgaagagtgagggtctcacagttccttacctcaaagtccctttaggtccttctggtttggaggaagtggagcctccacgaactctctcttactccgaccattcaggcagcaaagtctctgcttacatcattttggttgtcaccttggggctgagtgagaagtcttttgtaaattaattcggcgtgtgctacatgagccataattattaacagaacaggaatatcagaaacgaagttgttgatcaggcccactgcgaccttcctttctatctcagggtttaaaactgtgaggaaggagaagtatgaaggaaggtagaaaatgctggtgggtctccgtgtttatgagtcacagattttgaaagctatcaggaaatgactagagtggatcctggcactgattccaactctttgccagctaatcttaacatttagcagaaagctctagcaacatgatcttaattgtatccagaggatttgccaatgtatgttcagtctctcaagatttggcattagtcagacatgttgatgctagccacaatttggatttctccatagaataatcatttatttttgcagatcaaataaatcagagtttacaatgcacaggggatcatttatttagcattcccttgctagaagcccgtgtgccaggcactgtgctagaagtggtgggcagtataaagaaatctgtctccacagccacacaaccagagggtgcacatgacttgatccctatgaccaagtcaagttggtgttgcccaaatcgcagtttgacataagggtcccacaggcttccccaccccccgcccccactcactgccccagggaccaacttcctaccctcacccaaggctttagaggacctgtagcatgtctttttcaacctgtcagtatccccttctgcttaacacacccactgagaaaaccctgtttgtagttcactttgactcttgaatgtgtcactttactggcaagagacttcctttgatttctactgtttacaaataaaactcagccagtctcattctatatcccaaacgtactgaatgaaactgattttggttccacaagcagtgtttgggtgttgccttcctgaaggtgaccaagcttccaaagctcgtcccactggcctctgtacatttccctgtggttctccgtccttccctggcgagggagctgggactgaagctttcccgctgtttccctgcctgcaaaagcagccccaagagctgcgcattggcttccctcagcaatctgtcctgtctgtgctcccattcggtccacatagctttctttgcctctctgaggcagacaggaagtgtctaattacgattttgtggcctgggttttgttgcataccacagattgtctatgtaacatgtagcgcacacctctcttggtgctatttcattcctgctgtaagagaatgacaaaaatattcatgtatagccaattgattgtgacgtgcttgtggtctgtgcttgctcagaaaaacaaacaaacaaacagtttttccaattataaataaatgctaaagacgaacacc

SEQ ID NO: 128 - DNA, 7999 bp, Homo sapiens
cagtgatgagttctagaaggaaagaaaaggctgatgtgacagtgaggaagggatgagtggagacttctctgagacttcagtgattcctcttcctctgagctgagccaagctgagaagctgagaagagtaagatagggccgggaactcaggtccgttagtccgtcctccgaggtggggcgggccagcagaatggatttccgatctactctgtgagagcctcgcccaagaaagcccagagccacttccaagatccgcgctcccacggcgatgagaagcgttttcccccgggactgcttggcttaggactggggacccactggctttggagtaagccctggcacgggcctcgagggaagaaagaactcccgcgctccccacactccacagggcctgcgatcatctcagatgttccggttccacgtgcagaaaccccgccggtccgaggccccggttctaaaacggccctaagagtcaaggcttccacagctcgcctctgagggtggcaaagaggccgcgggggcggtgcctcgcgagacccaaacaagcccacgtggcaggggcggggctccgcgaaggcgtcacggcgcgctcgtgcgctgctgaggtcacgcgccggcagtacccttgcccgggggccgtaaagcgcggaaggtcgcggtctcggcttccccggaactttttgctcgcttcgccccgcccccttcccatccccgaaccccgctttccggcccgcggcgaccccaggcaactgttgtggctgccgcattgctcccgccgggctgtagctgagcgcggagcccgtggggaccggtgagatggaactgttttcccgcgttgagacgtgcggtccgcttgtgcttttagaactaaagactgctgcagagtccggaggaagaagtcacctagaaaaatctgggacagggcatttgagttcctgagatctagttggtgagagacatgatgttctaccggttgctgtcgattgttggaagacaaagagccagcccaggatggcagaactggtcctctgcaagaaacagcacgtcagctgccgaggcgcgttccatggccctgcccacccaggcacaggtggtcatctgtggaggtggaatcacgggcacttctgtggcctatcacctctccaaaatggggtggaaggatattgtccttttggagcagggcaggctggctgctggctctaccaggttctgtgctggcatcctgagcactgccaggcacttgaccattgagcagaagatggcagactactcaaacaaactctactatcagttagagcaagaaacagggatccaaacaggttacacaaggacaggctcaatctttctggcccaaactcaggaccgactgatctccctgaagcgcatcaacgcagggctgaatgttataggtatcccttctgagatcatctcccccaagaaagtggccgagcttcaccatctcctcaacgtgcacgacctggtgggggccatgcatgttcccgaggatgcagtggtgtcttccgctgacgtggctcttgccctggcaagtgctgcctcccaaaatggtgttcagatctatgaccggacatctgttcttcatgtaatggtcaaaaaaggtcaagttactggagtggagaccgataaaggacagattgaatgccagtattttgtcaactgtgctggccagtgggcatacgagctgggtctgtccaacgaggagccggttagtatcccgctacatgcctgcgaacacttctacctcctgactcgccccttggagacccctctgcagagcagcacaccaactattgtggatgctgatggaagaatttatattcggaactggcagggtggcatcctgtctgggggctttgagaagaacccgaaaccaattttcactgagggcaagaaccagctggagattcagaatctacaggaagactgggatcactttgagcctctgttgagttcccttctgaggaggatgccagaattagagactctggagatcatgaagttggtgaactgcccagagaccttcacaccagacatgaggtgcatcatgggcgagtctcctgcagtgcagggctactttgtcctggcaggaatgaactctgctggcctttcatttggtggaggagccggaaagtaccttgccgaatggatggtacatggttatccctcagaaaacgtttgggaattggacctgaaacgttttggagccctccagagcagccgcacctttctgcgccaccgggtcatggaagtcatgcctttgatgtatgatctgaaggttccccgctgggacttccagaccggtaggcagttacgcacctctcctctctacgaccggctggatgcacagggagccaggtggatggagaaacatggatttgagaggccaaagtactttgttccccccgacaaggacctcctggcattggagcagagcaagactttctataagccagattggtttgacatcgtggagtctgaagtcaagtgctgtaaggaagctgtgtgtgtcattgacatgtcctctttcacaaagtttgagataacatccactggggatcaggcattagaagttctacagtacctcttctccaatgacctggatgtgcctgtgggccacattgtgcatactggcatgctcaacgagggtggagggtatgaaaatgactgcagcatagcacgactgaacaagcgcagtttcttcatgatctctccaaccgaccagcaggtccactgttgggcctggcttaagaaacacatgccgaaagacagcaacctgctcctggaggacgtcacctggaagtacacagccctcaatctgattggccctcgagctgtggatgtgctgtctgagttgtcctatgcccctatgactccagaccacttcccaagcctcttttgcaaggagatgagtgtgggctatgcaaatgggatccgggtgatgagcatgacgcacacaggagagccaggattcatgctctacatccccatagagtacgccctgcatgtatacaatgaagtgatgagtgttggccagaaatacggaatccggaatgctgggtattacgctcttcgcagtctccgaattgagaagttttttgccttctggggtcaggatataaataacctcaccacgcccctggaatgtggacgagagtctcgggtgaaattagagaagggcatggatttcattggtcgcgacgccctcctgcagcagaagcagaatggagtgtataaacgcctcaccatgttcatcctggacgaccatgattcagacctagacctttggccttggtggggagagcccatttaccggaatgggcagtatgttggcaagaccaccagcagtgcctacagctacagcctggagcgccacgtttgcctgggctttgtgcacaatttttctgaggacacgggggaagagcaagtggtgacagcagatttcatcaaccggggagagtatgagattgacatcgcgggataccgcttccaggccaaggccaagctctaccctgtcgcctccctcttcacccagaagcgccgaaaggatgacatggagctgagtgacttacatgggaagtgatgccaccagggcagcctcacctcctccccatcatcttgtcctagagtgggcgtcaccttggagcttctcttccttccgcctctgttcctcttctggagcctttgcctcccatctcttatctccttgatataattttgaacttgacctactttaaacttttttgctctgcagccttccttgcccttccacctcctcctcctaatattcactctgggctcttcttcccttcccacccctcactcagcttctcgtggtggcaggaggtatgtctgacaggacagaagcaagctccactgtggacatgagtgatggtgacagctgctttcaaattctgcatctcaaggcagggcaagccggggtggtgcaggtctcagggcacgagtccctctcccttgggttccattttcttggagcagcctattagttctggtggggttgccgtgtgtcggatgcagccctgaggggcagctcgtgcctgcagcccggcagctcgttctcctgttctgctgtgctgtgggctggcactcgatacctctggcaagaggatgattatctacctcactgataagaggcatcgcatggacgttctctggtctgtagtggagacaagcagttaacctagcaccatcctcatcctccctgcagaagccattagcagacctttgggccagggcagcctccctataattttcttcatctcttgctaatctctataataaggttgctttttctttcttagttgagtaaacaagtaagccacagtgtttgaaagggaaaaaccatattgccttgtgtgttgcttttcccagtcaaaagggtctgaccttagaaagtccccaccagtgatgctgagtgttctgctatggaaacaatgctgcttttctctcagctgtccaaagttcagccgttcctccttccccttctcccagtgcgtttgactttgtcaggtcagcctcacttgtccctttcacagttggcccataaagtcatgtttctctccctttagaatagggaggggaagggatcaggtgtgttgtcctgggcctttcaaccttgcgggctgtgctgagttccagagagctgccggaattccaggtttgactctccagcacagagcagagctacacagaggtgacccacgttagtccactgagagttctgagtccaaagggtgtacgttgcataaggctagagaccgcttttcctcctttccccccaggctctttgtttccctccacccacccttccatatcctctggagcaggagacaatgtgggtgcccagaagtgccctgcgctttcaggcagtgtctctgttttcccaaggtgaaacttagatatcatggactgttgtccagcctcaatgcttcattttccccttgcatatcaactgccctaatctgactttttttaagtgcaaataaactgctataagacattttggttagtaaaactctagcctttggcgtgttggtatcttggaagcattagctctgataggtctataagtgtattaagggacatccttccatttcattagagcagcttaaaatgctcaggtgtctgccttctctggtgtttctttgggatctctgtttacccacttacgctggctccttctagacatttcttgccacttccccaactagaccactcctagtgattactgactttagtgcctaaacctttttggaaggttctggttggcttgttagaggagcatatgattagaattctgtttgggggtctagttgtcttggagcaagtatgtacttaactagccgagagatgctgcctctaggcagagaggaggagaggtgttgccggctggagggccaaccagtgaacaccagctgtgaaggccttgggagaggaggaacaggcccttgggcagatgcaggcattaccagcagggagcagacttacctccgaagatggagacaggtgactgagagctgcaggcctcctctgctcttccaaacacgtagcatttgcacccctccaaagccatctttgtaaaggaaaacgtatttgtaattgaatccagaagaatttagttacacatagacataactcttcaaccttaactatggcaatacatttgtgctttaactgttacatagcagtatcaccacttaccaggatccaaatcgaaataataaaagctgtctccatagtttaaaatcgaatagtgccatcatcacagtatattagtcaaatagaagcttcatcagaaatgtatcccacatagagttttaagacttggattctcttctgcccttgttaatctccaactaattactacagattgacacgtttttaattagctgtcctttgtaagaagtcaggaaatctgatgctgtgtccaaaattatgcactgtttgttgaagtagaaccagaaatcctgacctcctgttaaatgacatcagtttccccctctgagcaacagactgcttgtcttgctaggagaggaggatggggggctgagcactcaggctgtccattgaaaccccttgtccatgaatagggtcatactcctaagactgatggggtgttgatcttctaggacatcacttgtttattcagtgccccaaacacagatttctcttctagcactttagagttgatccttgaagtctctcctggttcattcaaatacaagctgtgtgagtctggtggttttctgtgattggtctaatgtgagctctttgaacagacagatctgacagtgaatgactctcccctgcttctggcataactgctttgcctctgtctagtgtccaagcatcttagctgttcaagaggagagggcagcataacttcctgaccaccggtgtcagatatcagagcattctggactcctgagaggcagtggcctcttgagtgaacaggggaggccagtagatgccccagatccagagccgtggctgcaaatccagcaggaataaggagggacaaccacagcctcctcatccatgtgtcatttccaagggtttgccttgtgtctcagctcattctgggcagcacgtttgtcttctgtccctagagatttgaaggattttggactcttgtgaatgggtgactggacttggctttacagagttgggtgcttttttctctctgcaattacctgtcatagcattttgtgctcaccacgaaggatggtctctgccttctcttgtcggtgtatgccatctgaacctaggaacacaaagtatattggcctcaaacggagacccagggttgccagttttccgtgggccttcccctcccttgaaatgtctttaattacctccccttcatcgtcaggccacgtgtgacttctgttcttagcactgccagggtcattgacttccatctaagcttgcatcaggaagatgttccttctgtgatcattggtactgaagccagaaaagctctcattcaggaactctgaagagcaaaaagggacaaacactaactgctgagctgggccatttgatctcctttcaccttgcattgctgtcacagcaccttgtatgatggcaggacaggctccagcagagagaactgcacagtgaccactgtatttttcacgctcttccagggatccctgtcccccgacattgaagagatctcattcaggccagagacacagagaccacatagcccagtgattaaaccccggtttcactctggccccaggagtggagcctggccactcctgtttggttctcactgggaggcccactggccttggatcatctcctcatgcacacccggagttttacctgcttgcttgctttcctggactgctgtttgcaagaaagtaactaaaacatgaaaagtaaacctccagcttccacagtatattacctgccgttgcatgcatttgaaagttagcctcctcccttgccaccgtcttggtggcagtagcgatgcaagaatgatgggagctttccgagagcgttcagtgtttcactgaagacaggacccatagccttcatttctggctctgtgtctcctctggcatatggacacatttcctggcatttgcctgagtctacaccactttttgagaacctgaaatagaagggaatcttctgtggcccacagtctccatattggcactagaagactggcctggcggaggaatttgcgttggcttgctttcaggggttagctacaagattcagctttatatctctgttgcttcttggccagtgtagtcaataagggtcttctttaacatctaagatagaggtttggttggccgggcgtggtcgcttactcctgtaatcccagcactttgggaggcccagtgaggtgggagaattgcttgaacccaggaggcagaggttgcagtgagctgagattgcaccactgcactccagcctgggtaacagagtgagactcttgtctc

SEQ ID NO: 129 - DNA, 7784 bp, Homo sapiens
ctgccccgccccgtcccgttccgttcctctgccccaccccgtcccgttccgttccgctgcccagtcctgctggtactcactaggtagtagcggcaacggacgccatggggaccgcctcgtcgctcgtgagccccgcgggcggggaagtgatcgaggacacgtacggggcgggcggcggcgaggcctgcgagatcccggtggaggtgaagcccaaggcccgcctgctgcgcaactcgttccgccgaggcgcgggggcggcagcaggggccgggcccgggtcgctgccccgcggggtgggcgcgggcgggctgctgggggccagcttcaagtccactggctcgtcggtgccagagctggagtacgcggcggccgagtacgagcggctcaggaaggagtacgagatctttcgcgtcagcaagaaccaggagttgttgtccatgggccgccgcgaggccaagctggacacggagaacaagcggctgcgggccgaactgcaggcacttcaaaaaacgtatcagaagatacttcgagaaaaagaaagtgctttagaagcgaaataccaagcaatggagagagcagcaacatttgaacatgacagagataaagttaaaaggcaattcaagatttttagggagaccaaagaaaatgaaattcaggacttactgagggccaagagggagttggagagcaaacttcagaggctacaggctcagggtatccaagtatttgatcctggggagtctgattcagatgacaactgtacagatgtcactgctgctggaacccaatgtgaatattggactggcggagccttgggaagtgaaccttccataggaagcatgatccagcttcagcagtccttcagaggccctgagtttgcccatagttctatagatgtggaaggaccctttgcaaatgttaatagagatgactgggatattgctgtagctagtttattacaagttactcctctgttttcacattctctgtggagtaacactgtcagatgttacctcatttatacagatgaaacccagcctgagatggatcttttccttaaggactattcacctaaacttaagagaatgtgcgagacaatgggatattttttccatgctgtttattttccaatagatgttgaaaatcaatacctcactgtaagaaaatgggaaattgagaaaagttctttagttattttatttattcacttaacattaccaagccttttattggaagactgtgaagaagcttttctgaaaaaccctgaaggaaaacctcgattaatctttcatcgtttggaagatggaaaagtcagttctgactctgtccagcaattgattgatcaagtttctaatctaaacaagaccagcaaagccaagatcattgatcactcaggagatcctgcagaaggagtatataaaacttatatttgtgtagaaaagattattaaacaggacatactgggttttgagaacacagacttggagactaaggatttgggcagtgaggattccattccagaagaagatgattttggtgatgttctgtgggacatacatgatgaacaagagcaaatggaaacttttcagcaggcttctaattcagcccatgagttgggatttgagaaatattaccaacgccttaatgatctagtggcagcaccagccccgattccacctcttctcgtgtctggaggaccaggttctgggaagtctcttcttttatcaaagtggattcaattacaacagaagaattcccccaacacactgattctttcccattttgtgggaaggcccatgtcaaccagctcagagtcctccttgattattaaacgactaactctaaagttgatgcagcactcttggtcagtctctgctctgacactggatcctgctaagcttctggaagaatttccacgttggctggaaaaactctctgctcgtcatcaaggcagcatcatcatcgttattgattctatagatcaagttcaggttgtggcctacacttcatcttgatcccttaagtccaaaagatgcaaaatctattataattgcagaatgccactctgtagacattaaattgagtaaagagcaggagaagaagctagaacgacactgtcgttctgctacaacctgcaatgccctttatgtcacccttttcggcaaaatgatcgcgcgtgctgggagagcaggcaatttagataaaatccttcatcagtgtttccagtgtcaagatactctttcattatatagacttgttctgcactctatccgggagtccatggcaaatgatgtggataaagagctaatgaagcagatcctctgccttgtcaatgttagtcacaatggtgtgagtgaatcagaactgatggaactctatcctgagatgtcctggactttcttgacctcccttattcacagtttatacaaaatgtgtttgttgacttatggatgtggcttgcttaggtttcaacatctgcaggcttgggaaacagtgagattggagtacctggaaggccccactgttacttcttcatacaggcaaaagctaatcaactatttcaccttgcagctaagtcaggacagagtgacttggagaagtgcagatgaactcccgtggctttttcagcagcagggaagtaaacagaagctgcatgattgccttcttaatctctttgtgtctcaaaacctttataaaaggggacactttgctgagttgctgagttattggcagtttgttggcaaagacaaaagtgcaatggcaacagaatacttcgattcattgaagcagtatgagaaaaactgcgaaggcgaggacaacatgagttgcttagctgatctttatgaaaccttggggcgatttctcaaggatctaggccttctcagtcaggccatagtacctttgcagaggtctttagagattcgagaaacagctttagatcccgatcacccaagagtagcccagtccctccaccaactagcaagtgtatacgtgcagtggaagaagtttggcaatgcagaacaactgtataaacaggcgttggaaatctcagaaaatgcttatggtgcggaccatccatatactgctcgtgaacttgaagcacttgcaactttgtaccagaaacaaaataaatatgaacaagctgaacattttaggaaaaaatcctttaaaattcatcagaaagctataaagaaaaaaggcaacttgtacggatttgcccttttacgtagacgggctttacagttagaagagcttacattaggtaaggacacacctgataatgctcggaccctcaatgaactgggtgttctctactatcttcaaaataacctggaaacagctgaccagtttctgaagcgttccttagaaatgagggagcgagttctaggaccagatcaccctgactgtgctcagtctttgaataatctggcagctctatgcaatgaaaagaaacagtatgataaagcagaagaactttatgaaagagctttagatattcggagacgtgcattagctcctgatcacccttctttggcatatacggtgaagcatcttgccatcttgtataagaaaatggggaaacttgacaaagctgtacctttgtatgaattggctgttgaaattcgacagaaatcttttggcccaaagcaccctagtgtagctactgccttggtgaacttagctgttctttatagccaaatgaaaaaacacgttgaagctttgccattatatgaaagagcattaaagatttatgaagatagcctgggtcggatgcatcctcgagttggagaaacactgaaaaatttagctgtgcttagctatgaaggaggagattttgaaaaagctgctgaattatacaaaagggcaatggaaataaaagaagcagaaacatcactcttgggtggaaaagctccttcacgccattcatcaagtggagacacgtttagcttaaaaacagctcattctcctaatgttttccttcagcaaggacaaaggaaagtccaatccaaccttttatctccagaagggctttcaaacatatgtgctcaggaaaaaaccaccaggttcacttcttcctaaagcacatcagattgatagagaatttaaagtccagaaagccttgttttcaattggattccccgttcccaagcctatactgtactgcagtgatacttctgtcattggaacagaattttacgtaatggaacatgtgcagggtcgaatcttccgtgatttaacaattcctggacttagcccagcagaacgttcagccatatatgtggccacggtagaaacattggctcagttacattccttgaatatacagtcactgcagctggaaggatatggtataggtgctgggtactgcaaaagacaggtatcaacctggacaaagcaatatcaagctgcagctcatcaggacatccctgccatgcaacagctatcggagtggctaatgaagaacttgcctgataatgacaatgaagagaatttgattcatggagatttcagactagataacatagttttccaccctaaagagtgtcgagttatagcagtgctggattgggagctgtcaaccattggtcatcctttgtcagacttagctcatttttccctgttctacttttggccaaggacagttccaatgataaatcaaggttcttatagtgaaaactcagggataccatcaatggaagaactgatttcaatatattgccgctgcaggggaattaattctattcttcctaactggaatttctttcttgccctttcatattttaagatggctggaatagcacagggagtatatagcagatatcttctgggaaataattcatctgaggatagctttttatttgccaatattgtgcaacctctggcagaaactggactacaactctccaaacgaactttcagtactgtactaccacagattgatactactggacagttgtttgtacagactcggaaaggtcaggaagttcttattaaggtgaagcatttcatgaaacaacacattcttccagctgaaaagattatgagactgatgcactgccctactgcgctaaggaggcaacctcctctttctaagagcttttctttctctttaatgttctgtagttttactatgctctggcttcattggctttccgaatttgaggattgctgtcttatcagttccgaaaacttttaagagaggtaactgagttctatgttcaaaatgaaaattcagtggacacgtggggaaaacctttagtgattgataaactcaaggaaatggccaaagtcgagggtctctggaacttgtttttgccagctgtcagcggactcagccacgtggactatgccttgattgctgaagaaacaggaaaatgcttttttgctccagatgtctttaactgccaagcaccagacacagggaatatggaggttctgcacctgtatggaagtgaggaacagaagaaacagtggcttgagcctcttcttcaagggaacattacctcttgcttctgtatgacagaacctgatgtagcttcaagtgatgccacgaatattgaatgcagcatccaacgagatgaagatagctatgtaattaacggcaaaaaatggtggagcagtggagctgggaatcccaagtgcaaaattgcaattgttttgggaagaactcaaaatacttctctctccaggtaattaaacaattctgattgagaaacctgtgtaggaatgagccagtcttcctcctatctaggtaatttacttaaaattcactgtttggactcacaaatcataatgtaagatatgagagtaaatgtcatatatttgtatttcacaagtattttctaacaggtgtttttggaaaacattatagggagtattgctgaacattcttcgctgtggaattttcagtattagaaagtgttgctaaattatcaaagctgtttggattaaattatcagacaaattttttcagacctgtgtaatgaagtgattagatgtttagatcaaaggcaataatcttgaaatgtttaattatatatataagttcccagttaccattgttgagcagtgagaagcttcaatcaaacaactcatttattttcaaatcattgtttctgttccagatcacagcctgcatcagactatgttggtgtacgtcttttacacagttcccattccagtcatcactgcttacatgactacatgaaaacatcaaaaagacaattgtgattctgcttattatctgttttatttttcttcttagcaaactttttctaatacaatttttcttttgactagacacaaacagcacagcatgattcttgttcccacgaacacacctggagtaaaaataataaggcctttgtcagtttttggctacacagataattttcatggaggacattttgagatccattttaatcaagtgcgagttcctgccacaaatctaatactaggtgaaggtaggggatttgaaatttcccaaggccgccttggacctggcagaatccaccactgtatgagaacagtaggtttggcggaacgcgctttgcagatcatgtgtgagcgggcaacacaaaggatagctttcaagaagaagttgtatgcacatgaggttgtggctcactggattgctgaaagccgcattgccattgagaagatccgcttgttgactctgaaagctgctcacagcatggacactctgggcagtgctggcgctaagaaagagattgcaatgatcaaagtggctgccccacgggctgtcagcaaaatcgttgactgggccatccaggtgtgcggaggtgctggtgtttcccaggattaccctctggctaacatgtatgctataacccgagttttgcgtttagcagatggacctgacgaagttcatctttcagcaattgcaacaatggagctgcgggaccaagccaaaagactgacagccaagatataaggagggtggcactgccacatcccactggcagaaactctcctttatacaaacttcattggctccaacatttgaatctcatatttttgtagcagtttgagcacagggttaattattcatttgtggtaaagattatagcatctattttgatcagtgggttttattatttcaagggtcacacagggttaagttcagtaagaaatgctgtagctgttgtcattcaatctagtgcctccttgaggccaggagttcaggaccagcctgggcaacatagcgagacccccattgctacaaaaaatttaaaaatgaaacaagtgtggtggcacatgcttgtagtcctagctacttgggaggctgaggcaggaggattgcttgagtctaggagtttgaggttacagtaagctgtgatcgtgacatggcctccagcctgggtgaccgagtgagactgtttctaaaaataaaaacaaaaaataaatttcttcttgaggtggggtggaggtggggagcaagaatttgacctggctctgatccctggtgtgttgtgtgggcctctttaacgtttgccactgagccttaacctcactgtacttcactgtacttcacacgcattggtgttaacattttaatcttagaagaccctgacccactgagggtttgttgtgagaattgctgaagccacgtagaagcaccttgaaatctgtaaaaccacaagaaagtactttataaaaggtatccttatttgaagtggataaatcttgtaactcgaaaagttgtgatttagaagacaggattgtttttgaacattaggaattaaaggctatatctggtcctt

SEQ ID NO: 130 - DNA, 6714 bp, Homo sapiens
cctgtagaagaaaaaagaaattctgaaaaagaagtatcaagtcacttcagtcatttcaagatttcttcacagactcatgaatctgataaaacagaagtccaggggattcaatctccagatgttccagagcagttttcagatattaatttaagcaaatctcttcctcaagaacagaagccacttgaaattaaaccagcaccttttgtgaggagccgattcaaaagaccaaaaccaaactaagcaagagcagctttgaagagagagactacagaatcagaaaaatatatatatgagaagaaatcagaaaccaagaaaatggagactattgtgatgcaagaaaataatgaacaaactgatactctcccttctcaacatgatgaagcttccctaatgatatcaagagaaaaagacacattaggtcacaggaatgaggaggctgtgatattgccatgtacacagactgaaaggaacctttcaccttcaaattcttgtgaacctaaagaggagtctcagtcagcaccagtccagaaaaatgactcagttgtttctgtggggactaataatgtaaacactttccagcaagaaatgaaggaaagtgttatccaaactgctcgacaagtaaggggccgacttcagagaccgagaccaaatataagaaagacaggacagaggcaaatagtagacaaaggtgaagccaaaggcataattaaggaaggaagaacgatattaccaaaagatgaaactgaaaagaaagtcttaactgtgtcaaattctcaaattgaaactgaaattgaagttccatcgtccgcagttccagaacacagaatgtatgaaaatcaaagtcaggtggttcttgtagaaaaccttcatgttaacaaaacaaatgaaacaatcagacatgaaaataaaccgtatgttcctagttcagcacaaatgacaagaaggaaattccaaaaggctaagccaaatttgggaagagcacacagtaagaaagaggaaccagttttagaaaaagtcacaacagatcagagcaaggaaggcaagccagaagatcatttgctgcagaaaggagcttccaacacccagctccttctaaaagaaaaagctgagcttctgacatctctggaggtttcagcaagaaaagattgtgtaggttccaaagagtctgctttggcaaaaatagatgcggaattagaagaagttggaccatcaagaagggttggagaggaaactgtaggagataattcaccatcttcagttgttgaagagcaatatctcaataaactaacaagctgtccacaaccgttaaacgaaacaagttactctaaaattgccctggatgggaaaacaactatctcttctacatctgagtatgagagaaatcgtggtgaaaggagaagtcataaaaagttcaaaccaaatgtcaccagaggtcgtggatcaaaacgagttcggggtaagacctctaagaaggaacctagagcttccaaggccatgctggtgactcttcgggcttcccaggaagaagatgatgatgctgacgattttgagtctgactatgaggaagaaagctatcatcttgctcccgaagaagtaaacaaagctccagtatttgtacctgttggtctcagatctcctgaacctgtttctgctcagattgaggaaacaatggaagagcttgaaataactgtgaatgtcccagatgtaggatgcatagctgttgttgaacatgagctaccaaacacagatgtgactactgaagaaatgaaacaagaagaaaatttgagtgtaccgtttgaaatgaccacaagtgaacatatccaagatgaaccaggtaccaatgatggaagcaccgaagctgcaataactttacttacaatgggagatctagtattgcagtcagagatcagtagtgaacagggtgatgtaggagtatgtataattcctcatgttcattcaaaggataaaagccatattccttctagcctagataatgtaaatcacaaaattgttcatgaatgtcaggaactttcttcacctgtcattactacatctcctgcatcatttgaagaaaacaagattgtattggaggaacaaagttccagagaagaaataagtttaatggagaaagtaaaggagaatgctacaccaaccaggaatacaatttctaaagtgaccagtaatttgagaataagaagtaggcttgctaagcctaaaccaaatcttgagaagactttagggaccaacaggcttgatgattatcaggaagtttccagtttgtgtgtaaccaaaggggcagaaatggaaactcaaagagaaacagagaaaaatgcttccaaagcaacagaattggaaaataaaaacctcggaccagttacaacagcagagaataaggatcagagcaaattggcatgtgtacatggtatcaaagggaccagtatttcttcagaagtaaacctaactgaaagaaacgaaaatcaagaagagagctctcaggaggttcacatgttgtcagttgctccagttgcttcctctgagacagggccctgcacacttggtttggataggggtcttggtgaaaattctgttgaagagccccagataaaggactctaaaggagacagtgtgcttacacttcctgtgccagagtatacaccaacaagtattccagaagtccaacaagagaatataatcaatcctcaagacctaacagtgaatctagttgctaatgtacctcaagatggagaagatgaacaagcctttattttaactctggtggaaatcccagccaatgcagtagaagaatttactgatgccactgcacagttcatgccaaaccctttactgccagctcccatattggtcaaatcagtgaataccgaagaaaggggtgacatgagtatttgtttaccagcaacttcagttggtcaagatgccatgggtttatctatttctggaagagataattctaaaaagccgcctgataatttggatcttgtatctaggaagagatttcaatgcaggcttgataaaaatgaccacattcctcctgccaaaaaacgttcactcactttaagagatgactgtcaagaatataccactgaggtgcactcaaaggaattaacaaatgtttttgaggaaacaggggagtctcacaagggacaagatatttttcttacctcaggaagcacactgacaactccagaacctcaaagacagcaagttgaagcagcttttcagagtagaggatctagatctcctgatgcatgcatggacaagaatgtgcctcagttacctcaggatgaaatgattgtgtctgataaggaagaaagaactgatgctgctcctaagtctcagcaaatggatagcagaacatcgtcttctaaagcctcactatccagacctggcagaagacccctgggatttttatctttaatatgctcaaagaatagtttggagtctgatgaacctatgcaagtccatagtaagaaacgcctaaaacctcttatacctggattaagaaagaaattgaaaagatctaatccattcaatgaaagccaggaaaaaaatcgagagtcctctgatctgcttccatctccaagtgttattactactcaatctgagaatattagcagctcagcaactcaggtttcttgtgatcagcccttactgaaagaaggatataaaagtgcccaaaagcgggcccctcaaggggaggcaaccacagtctctgaatatttcttcaatgatatcttcattgaagtggatgaaacagaataaaacaatcttttctctttttcttttttaaattaggtctaggatttccagagtcaattacatcaacaaaacagtatttagagcaaaatatcactgtcttatttttctttaggttgattttgaatacttaatgagcttgatttgaagcttttataatcagtggaaaacatttctgaggttcctttcattctgactgattcagcattttgcaaatagcaagcaattaagactgctttctcagacagaaataacaactcttgtttacattttgactcttcctgtgctaagcacacatggacatttgggaatgttgtggatatatgtctctgtatgaattgcagtgcagacagatttgggggttaattgtatcatatttaacatttagcaacttcttttgtgaagattttttatttttagggggagatgatgaaggatgaaggctttttcatttgcttctaagtacagtcatgtatcacataatgaagtttaagtcaatgatggaccacatatattacagtggtcccatgcaattaaaatggagataaattcctatcaactagtgacattatagccatcataacacagtgcattgcttttttatgtttagatatgtttagatacacaaatacttactattgtgttacaactgcctacagtattcagcatagtaacacattgtagaggtttgtagccgaggagcaataggctataccacatagcctcagtctgtacggtgtgtagcagcctgtaccatctcagtgtttgtaagtacactctgcgttgtttcacacaagatcacctaacaaggcaattcttagaacatgtagttaagggacacgtgactatatgtgaaaacaaattgtcaaacttcactttagtatggcaaatgttaaagaacttttctattatcagctgtttgtctgactgaaaaatacatatttttctaattcatggtgatgtaacattagtcctaattgaaaaactagtatttaaacataattatttataaagatgacacatcaaagggcttatttatttttaaattttttatttaaaaggatattcagttttagctatttttacccctcagattgtagataaagaaggcattaaatttatgtttgtctcctttttctgtttaattttaaagatatttaaaatgatataactaaaaatgtttagctggtgtatatgttttgaatacctttttcccctcagtttagtatattgactttgtactgtaaatttttctgcttttcttggataatctcaggattttcatgaggatagggggaactcaactttatttatgagacaaaatttccatacaaagctcaatctcctttatacacccacagacataatattagtttttaaaaagccaatttcttcatagttttttcccattaaattctcaaggaacacttggatctttaagcacggaacataatcatgatgttaaaaacagagaaaataaggctttataaagttaatgattatcatcagtatgaatttaaggtttgttttaatttcaagatttgattttttatacgtgtaattctattatctacccaagcagatctgtagtggttccaattagacttctcaaacagcaaatttatcctgattttatttgaaaagcctcttggattgatagtatagtagctcaggcattggaaactttctgcaaactgttttgggtttgcaggccagatggtctctgtggcagctactcagctctgcaatttcagtgtgaaagaagccatagacagtacttgaatgaaggactgtggctggattggccttttagtttgaccccctacattaggccccaaattttcttaccctgaggtgctgatatctgtatggatgagttatttgtcactaaagttatgagttgtgcctaaaagttaaaactgttgactgtattatgtaatgatcagtatttcagttgggaagatattttagagtctagataattatgtttgtatattgaaaaaatggtggccagtttttaagttccttaatagaagagaattatgtctcagcacatataacagtaatgctaatttattgaaactactgctgttagagcacttcttattcattgtcttttagtgaaatttatggcgtaacactttgtcagagaggaggctatataattcggagcggaaattgtctataagtaggcatttatttcatgattgatatgtcacagaaatcatggtagtaaatcacattgctatttgaataccctgtttttgtaagtttttaaaactcatattctgaaaagatttcattctcttagtgttagcttgggagttagattgccatgattaaactattatttatccttgtgtaatattagtttttaactttaacatctgtttctttttaatctataatgagctagttttatggaaaatggaatttcttactatataaagaatacagagactcattgtattagagaatcaagtcagccagctaaagtatcctactgttaaatccttaaacctaattttggaaaagagaaagttaatcaatgtatttaccttacatgttggaaagaactatgttaggtctgattcatgtgaagaagatgttgcaaaggatttatttcacaaattttaaaggagatatgagtaaaagtttttatcttttcttgactttttctcctgaacacttatgtcttagcaagtggtcaacatgaggatttgaacgcctaattgttggtaaatggttgaggcatgacaaaaatattaatatccactgtttaccatcatgttatttgaaacaaaagtgaccatgtatactatcttgcttgaagaagtctttgacagaaaaagcaatatcatgtcatttataaattttcttgttctaaagaaagcagttatatatatatataaattatgtaaataaaagttattttatatc

SEQ ID NO: 131 - DNA, 3682 bp, Homo sapiens
accggacaggccttgtccggcaataccaagtttcatgcaggctcttgggaaagctggtgctgctgctgcctgattcccgccgacagaccttgggaccggggccaacactggcagctggagatggcggacacgagatccgtgcacgagactaggtttgaggcggccgtgaaggtgatccagagtttgccgaagaatgggatgcttggagttcactgggtgatatgaccaaagaggaagccatgattgcatatgttgaagaaatgaaaaagattattgaaactatgccaatgactgagaaagttgaagaattgctgcgtgtcataggtccattttatgaaattgtcgaggacaaaaagagtggcaggagttctgatataacctcagatcttggtaatgttctcacttctactccaaacgccaaaaccgttaatggtaaagctgaaagcagtgacagtggagccgagtctgaggaagaagaggcccaagaagaagtgaaaggagcagaacaaagtgataatgataagaaaatgatgaagaagtcagcagaccataagaatttggaagtcattgtcactaatggctatgataaagatggctttgttcaggatatacagaatgacattcatgccagttcttccctgaatggcagaagcactgaagaagtaaagcctattgatgaaaacttggggcaaactggaaaatctgctgtttgcattcaccaagatataaatgatgatcatgttgaagatgttacaggaattcagcatttgacaagcgattcagacagtgaagtttactgtgattctatggaacaatttggacaagaagagtctttagacagctttacgtccaacaatggaccatttcagtattacttgggtggtcattccagtcaacccatggaaaattctggatttcgtgaagatattcaagtacctcctggaaatggcaacattgggaatatgcaggtggttgcagttgaaggaaaaggtgaagtcaagcatggaggagaagatggcaggaataacagcggagcgccacaccgggagaagcgaggcggagaaactgatgaattctctaatgttagaagaggaagaggacataggatgcaacacttgagcgaaggaaccaagggccggcaggtgggaagtggaggtgatggggagcgctggggctccgacagagggtcccgaggcagcctcaatgagcagatcgccctcgtgctgatgagactgcaggaggacatgcagaatgtccttcagagactgcagaaactggaaacgctgactgctttgcaggcaaaatcatcaacatcaacattgcagactgctcctcagcccacctcacagagaccatcttggtggcccttcgagatgtctcctggtgtgctaacgtttgccatcatatggccttttattgcacagtggttggtgtatttatactatcaaagaaggagaagaaaactgaactgaggaaaatggtgttttcctcaagaagactactggaactggatgacctcagaatgaactggattgtggtgttcacaagaaaatcttagtttgtgatgattacattgctttttgttgtccagtagtttagtttgtgtacatatatacacatatatattttgcactacacaaacgataacattttaaggactaatattgctgatacttgaataatcaatctctactaggttataagtagtatacacagatttaccctgcccttgaacttgaaggacattaaattattaatgatcatttggtaacatgtttacctgattatcttccatagagtaacataagctgcttttcaaaggtaccattgtgataatgagatcaaatttataagttattatttttaattttctaaattaaataaaagaaagaatgcaaaccaggagtgaatttcaaatgagatgtaatcgactttatatcttagtcacggagttgccatggcatgtagtagaaaaccacaggaagaatggtcatattcactttgtgggctgcccataatctttcttgggcattcacaactcttgagtttggtgttcaggcatcattattaaaaagtggagtcctatgtaccagactgagtttttacaaatgatttgcaggctagacataacccactgatggaaatggtgaagaatgagcttcatgtaggtttaaaagtgtattctgagcctgtagatgattaatcaggtttttattcaatcatataaatgtattcctttgtaatcatttttgtttaactgaggatatctagtgtctgcttcatagggtgctttgaaatataaaatgaaaacttatttatactgtttttacaacagtcaaaaaggaaacacacgaaaatcacttttctgcaactgatgaactatatagactggactcttaacctcttagtgcctcagtttttccttcggggtatactattttagatacacctacttcacaggagtactggagggatttgcaagctaacgggccaaatgcttccataggaataaggcatgcccagctaacagaaatttaagtccctcttccccacctctctcatctagaccaaaaagaagactacaatttagatccttggagacttttcctgtatgccttccaaaacttcctgctcacttagatgtaccttgtgctttgaagatttctttgatgcagtctttgtaacaaataatttttttttttaaatggagtttctctcttgttgcccaggctggagggcaatggcgtgatcttggctcactgcaacttccacctcctgggttcaagtgattctcctgcctcactcccaagtagctgggattacaggcatgcaccaccatgcctggctaattttgtatttttagtagagacggggtttctccatgttggtaaggctgatctcaaactcccaacctcaggtgatctgcctgcctcggcctcccaaagtgctgggattagaggcgtgagccactgcacctggcctgtagcaaataatttttaagcattctcaagatgtatgatgttgggtttaacatcatatgttcacagtgttttaaataagaaataatctgtctttagtatacaggatggttctttgtttgcctgaaaagtataagaatacaatttacttttcccaaactctttttccttatttttttctttcaaataactttaattatttaatcccatactgattaaaatatgtctgtctaaagggatctactactatttgcttttaaaaaagtgttccctatttatttaggaaaaagtgaagcaagcaactgaatttatatgtaaaaataacatttagacctgtggatcaaagattattttcaaaaatgagatatcaatttggtatcagtaaaaagtgtcttttctcttagtatataaataaataaaatgcaaattaagagtgtaagcagttgtgaatcattacaagcagtctgggataactaactcctagggataaccatttctatcctgttccaaagtcttattttatagtttgaaaagcactttgcacacagttcttgtatataaaagtaaagatgtaattataggatatagtgttcctgctttgtttaataagaacctcatttaaacttgacagctatggtatttttttaatgataacttcttttctgtttattgtaaaactaagttaaaaataaaaggttaatgag

SEQ ID NO: 132 - DNA, 3955 bp, Homo sapiens
gcaggattagaatcgaatctgaagaaaactgaagacagaaaaaggaaactagaggagcttcttaattctgttggtcaaaaggtatcagaactcaaagaaaaatttcagagcaggacttcagaagctgccaaacttgaggctgaagtaagcaaggcacaagaaacaatcaaagctgcagaagtcttaattaatcagcttgacagagaacataagagatggaatgcacaggttgtagagataacagaggaattagctactcttcctaaaagagctcaacttgctgctgcatttattacatatctttctgctgctcctgaatctctgagaaaaacctgtttggaagaatggaccaagtcagctggtcttgagaaatttgatctgaggagatttctttgtactgaaagtgagcagttaatttggaaaagtgaaggcctaccatcagatgacctttccatagaaaatgctcttgtaatattacagagtcgagtgtgcccatttcttatagatccttcttcccaagctacagagtggttaaaaacacatttgaaagactcacgtttagaagttatcaatcagcaggatagtaactttatcacagctcttgaattagcagtacgttttgggaaaacccttattatacaagagatggatggtgtagaacctgttctttatccattattgagacgagatctggttgctcaaggaccacgttatgtggtacaaataggtgacaaaattattgactacaatgaagaattccgcctctttttgtcaacaagaaacccaaatccttttattccaccggatgcagcttccattgttactgaggttaactttactacaacaagaagtggattacgagggcagcttttagctttaaccattcagcatgagaaacctgatttagaagaacagaaaacaaaactattacaacaggaagaagataagaaaatacagctagccaagctcgaagaatctcttctagagacacttgccacatctcaaggcaatattttggaaaataaggatttgattgagtctttgaatcagacaaaagcaagcagtgcacttattcaagagtcacttaaagaatcttacaaactccaaatttcccttgatcaagaacgggatgcctatctccccctggctgagagtgccagcaagatgtacttcattatttctgatttgtccaaaattaataacatgtaccgttttagtttggctgcttttctccgacttttccaacgagctctacaaaacaaacaggattctgaaaatacagaacagagaatccagtcacttatcagctcattacaacatatggtatatgaatatatatgtcgttgtctatttaaggctgatcagttgatgttcgctttgcattttgttcgaggcatgcatcctgaactttttcaagaaaatgaatgggatacgtttacaggtgtggttgttggagacatgttacggaaagctgactctcaacaaaaaatacgtgatcagcttccgtcttggatagatcaggaacgaagctgggccgtggcaacattaaagattgctctccccagtctttatcagaccctctgctttgaagatgcagctctgtggcgtacttattataataattcaatgtgtgagcaagagtttccatctatccttgcaaagaaagtttccttatttcagcagattcttgtagtacaggtgctaagaccggacagattgcaaagtgccatggctctttttgcatgtaaaactctgggactgaaagaggtgtccccactgcctctaaatctcaaacgtttatacaaagagacactggaaattgaacccatcttgataattatttctccgggtgctgatccttctcaggaacttcaagaactagctaatgctgaaagaagcggagagtgttatcaccaggttgccatgggtcaaggtcaagctgatttagcaattcaaatgctaaaagaatgtgcccgcaatggagactggctctgtttgaagaacttacatcttgtggtatcttggctgccagttctggaaaaggaattgaatactcttcaacctaaagatacctttcgtctttggctcactgcagaagttcatcccaactttactcctattttactacagtcaagtctgaagataacatatgagtcacctccaggtttaaagaagaatttaatgcgtacttatgagtcttggactcctgagcaaattagcaaaaaagataatacacatcgagctcatgctctcttcagtcttgcatggtttcatgctgcatgtcaagaaagaagaaactatattcctcagggttggacaaagttttatgaattttctttatcagatcttcgggctgggtacaacattattgacagactttttgatggtgccaaagatgtacaatgggaatttgtacatggtttacttgaaaatgctatttatggaggacgtatagacaactattttgaccttagagttcttcagtcatacctgaagcagttttttaattcttcagttattgatgtattcaaccaaaggaacaagaaaagcatttttccatattccgtatctctaccacaatcctgcagcattttggactatcgtgctgtcattgagaaaattccagaggacgacaaacctagtttctttggtctgcctgccaatatcgctcgctcatctcagcgcatgatcagttctcaggttatttcacagttgaggattttgggcagatccataacagctggttccaaatttgatagagaaatctggtctaatgaactttctcctgtcctcaatctctggaagaaactaaaccagaattcaaacctaatacatcagaaagtgcctcctcctaacgatcgacaaggatctccaatactgtcattcatcattcttgaacaatttaatgctattcgtttagtacaaagtgtccaccagtctcttgctgctctcagcaaagtcatcagaggaactactttactgagttcagaagtacaaaaattggcaagtgctttattaaaccaaaagtgtcctctcgcatggcagagcaagtgggaaggcccagaagatcccttacaatacctgagaggtcttgttgcccgtgcccttgcaatacagaactgggtagataaagctgaaaaacaggctcttctctctgaaacacttgacctatcagaacttttccatccagacacatttcttaatgctcttcgccaggaaactgcaagggcagtgggtcgttctgtggatagccttaaatttgtagcctcatggaaaggtcgactgcaagaagcaaagctacaaattaagatcagtggcttgttactagaaggatgtagttttgatggaaatcaactttctgaaaatcagcttgattctcccagcgtgtcatcagtgctcccttgttttatgggctggattccacaggatgcatgtggtccatattctccggatgagtgcatctctttgcctgtttacacaagtgctgaaagggatcgtgtggttaccaatattgatgttccatgtgggggcaaccaagaccagtggattcagtgtggagcagctctattcctaaaaaatcagtagaatctaatgacaacaaaagccatcttcacaaaagggaacattgattctttaagctttaaatcaaacatgtggtcagtctacatttgaaatgttagttcaaaatattaacatatagttatgttgttgatgtcactgaaattttaatgtgtaaaagcagcactgtgcatcttttaaagtaataaattaatggagttattgttaaaacagagtattcttttgacaacattaaatatttctgtgagaaagttcacttttccagtggctcaaaaatttgttttaggtcagagattttaagtggtatattaaccaataataaatattttggctgtcatttgtgtcataattatttaataaaagagcattcataatt

SEQ ID NO: 133 - DNA, 6004 bp, Homo sapiens
gcgccttggagttctcgcttccactcacctccagaggacgatgcccctcaccccacacccacgttcatccaagcatggtctctgctcccttttctggtcctgggctgggcagcctgggccgggagtgctcctggcttctctgggatggctggagcccaccacaagccccagccctggcccgtgctgtcctcctgctgggaggagttgcttagtgcagcagacagagcagaggctctgagtggtcctgccactcactagctgtgtggccttgggcaagtggatgaacctttctgaggtccagcgttcccgtctgtaaaacagaattcccagcaggacctaccttgtgagtttcagaggcttaacggagatagtccatgagagagctgtgtgctccagggcagccgttctgtcccactctggccggtcctgcctttggcatggcctgtcctccgtggccttgtagagacgcaggagtctcaaaggcagtggaagacagaggccccagggtgggcccgcctgtagccccacttcccccacgtcaggaggaaagggaagagggagagtcccccagtctctctcagttggcagaggctctgcacccctttacagaggatcctgccgcctcaggacagccaggagggggctggagggagaggaggtggcccctgccctcagtccctggacgggcactattcatggccccctgttctgtcccacaatccagtgtgtccttgtgaccgtgccctccctgaggctggtggtgatggtggcctgtgtgtgcatccaagctcctgtgtgtgtgtttcaaggggcacaaagctgcatgaagcttcctaagagagtgctgagggagcacttcctataggaggaaggctggaaggcttcctggaggcagcagcctggagccctgtgcatgaggatgcgggactctgatagccaacctgctatttagtagggaaagtcgccttccaagccacaggatggccgtgacaagaggcccaaaggctcgcaggagtgctgcagcagagggcaggggtgtgggcagctagagggacctgtggctgggcagggctgaggtagcccgtgtgctgtgccggatcctttagacttgaccctgttggctacacagcatcagccctgggtattactcatccctgcgccctggccagaatgaaggaagcctctggggtggggggagggcacagccccatgtgcccacctcactgccacatgcccccaggccctgcgggtgaatggcctggagcaactgtgcaacaacctcgccagcgagcgcctacagctcttctccagccagatgctgctggcccaggaggaggaggagtgtcggcgggagttgctgtcctgggtgcctgtccctcagcctccgagggagtcctgcctagacctcctggtagatcagccccacagcctcctgagtatcctggacgcccagacatggctgtcccaggctggagtgcaatggtgcggtctcggctcactgcaacctccacctcccaggccacggaccacaccttcctccagaagagccactatcaccatggtgaccaccccagctatgccaagccccggctgcccctgcccgtgttcaccgtgcgacattatgcagggactgtcacctaccaggttcacaagtttttaaacagaaaccgggatcagctggaccctgctgtggtggagatgcttggccagagccagctccagctggtgggcagcctgttccaggaggcagagccccagtccaggggagggcgaggcagacccacgctggcctctcgcttccagcaggccctggaggacctcatagcccggctgggcaggagccatgtctatttcatccagtgcctcacccctaaccctggaaagcttccaggcctctttgacgtgggacatgtgacagagcaactgcaccaggcagccatactggaggccgtgggcacccgcagtgccaacttccccgtgcgtgtgccctttgaggccttcctggccagcttccaggccctggggtcagaagggcaggaagacctctctgaccgggagaagtgtggtgccgtcctgagccaggtgctgggggccgaatcacctctctatcaccttggagccaccaaggtcctgctgcaggagcagggctggcagcggctggaggagctccgggaccagcagcgctcccaggccctggtcgacctgcaccgcagcttccacacctgcatctcccgccagcgcgtcctgccccggatgcaggctcgcatgcgtgggttccaggccaggaagcggtacctccggcggcgggcagctttgggacagctgaacaccatcctgctggtggcccagcccctgctccagaggcggcagagactgcagcttgggcgttggcagggctggcatagcagcgaaagggccttggagagagtgccaagcatggagctggggcgcttggagatcccggctgagctggccgtcatgctgaagacggcggaaagccatcgggacgccctggctgggagcatcaccgagtgcctgccgcctgaggttcctgcccggcccagcctgactctcccagcagacattgacctgttccctttctccagcttcgtcgccatcggctttcaggaaccgtccctgcccaggccagggcagccactggcgaagcccctaacccagctggatggagacaaccctcagcgtgccctggacatcaacaaagtgatgctgcggctcctgggggacggatccctggagtcctggcagaggcagatcatgggcgcatacctggtgcggcaggggcagtgctggccagggctgcggaatgagctctttagccagctggtggcccagctatggcagaacccagatgaacagcagagccagcgtggctgggccctcatggctgttttgctcagcgcctttcccccactgcctgtcctacagaagccactgctcaagttcgtgtctgaccaggcccccaggggcatggcagcgctgtgccagcacaagctgctgggggccttggagcagtcgcagctggcctcgggggccactcgggcccaccccccgacccagctggagtggctggccggatggcggcggggccgcatggcgctggatgtgttcaccttcagcgaggagtgctactcggccgaggtggagtcttggaccaccggggagcagctggctgggtggatcctgcagagcagaggcctggaggcgcctccccggggctggtctgtgtcactgcactccagggacgcatggcaggacttggctggctgcgactttgtgctggacctgatcagccagactgaggacctgggggacccagctcgcccccgcagctaccccatcactcctcttggctcagccgaggccattccccttgcccctggcattcaggccccctcactgcccccaggaccccctccaggtccagccccaacgctgcccagcagggaccacacaggggaggtccagaggtcagggagcctggacggcttcctggaccagatcttccagccagtgatatcctccggcctcagcgatctggaacaaagctgggctctgagcagccgcatgaagggagggggcgccattgggcccacacagcagggctaccccatggtgtacccaggaatgattcagatgcctgcataccagccaggcatggtccctgcacccatgcccatgatgccagcaatgggcacagtccctgccatgccagccatggtggtgccgccgcagccaccgcttcccagcctggatgcagggcagctggccgtccagcagcagaactttatccagcagcaggcgctaatcctggcccagcagatgacagcccaggccatgtccctgtccctggagcagcagatgcagcagcggcagcagcaggctcgggcctccgaggctgcgtcccaggcctcaccctcagccgtcacctccaagcccaggaagccccccacacccccggagaagccacagcgtgacctgggatcagagggtggctgcctgagggagacctccgaggaggctgaagacaggccctatcagcccaagagcttccagcagaaacggaactatttccagaggatggggcagccacagatcacagtgaggacgatgaagcccccggccaaggtccacatcccccagggggaagcgcaggaggaggaggaggaggaggaggaggaggaggagcaggaggagcaagaagtggaaacaagagcagtgccgtcccctcctcctccccccatcgtgaagaagccattgaagcaaggtggggccaaagctccaaaagaggctgaggctgagccagccaaggagacagcggccaagggccatggccaagggccagcccaaggcagggggactgtggtgcgcagctcagactccaagcccaagcggccacaacccagcagggaaattggcaacatcatccgcatgtaccagagccgcccgggccccgtgcctgtgcccgtgcagccatccaggcctcccaaagctttcctgaggaaaatcgaccccaaggacgaggctctggccaagctgggtatcaacggtgcccactcgtccccgccgatgctgtcccccagcccaggaaagggccccccgccagctgtggctcctcgacccaaggccccgctacagcttgggccctctagctccatcaaggaaaagcaggggccccttctggacctgtttggccagaagctgcctattgcccacacacccccacctccaccagcgccaccactgcctctgcccgaggacccagggaccctttcagcagagcgtcgttgcttgacacagcccgtggaggaccagggggtctccacccagctactcgcgccctctggcagcgtgtgcttctcctacaccggcacgccctggaagttgttcctacgcaaggaggtgttctacccacgggagaacttcagccatccctactacctgaggctcctctgtgagcagatcctacgggacaccttctccgagtcctgtatccggatttcccagaatgagcggcggaaaatgaaagacctgctgggaggcttggaggtggacctggattctctcaccaccaccgaagacagcgtcaagaagcgcatcgtggtggccgctcgggacaactgggccaattacttctcccgcttctttcctgtctcgggcgagagtggcagcgacgtgcagctgttagccgtgtcccaccgtgggctgcgactgctcaaggtgacccaaggccccggcctccgccccgaccagctgaagattctctgctcatacagctttgcggaggtgctgggtgtggagtgccggggcggctccaccctggagctgtcactgaagagcgagcagctggtgctgcacacagcccgggcaagggccatcgaggcgctggttgagctattcctgaatgagcttaagaaggactccggctatgtcatcgccctgcgcagctacatcactgacaactgcagcctcctcagcttccaccgtggggacctcatcaagctgctgccggtggccaccctggagccaggctggcagtttggctctgccgggggccgttccggactctttcctgccgacatagtgcagccggctgccgctcccgacttttccttctccaaggagcagaggagtggctggcacaagggtcagctgtccaacggggaaccagggctggctcggtgggacagggcctcagaggtgaggaagatgggagagggacaagcagaggcaaggcctgcctgagactgaggaaggaaaggggtttgaccactcccgaggctgccatgcggtgggaccaccctgctgtccgtctcctgtggctgcccctctgcccgctcctgatggctcgccttgtctctccagcaagactgtgcactccttgcaggcaggggctgggctggatgctgctcttgtgtcccacgtggtacttagttcaaggctgccccagcagatgcttaataaacagctcttcactttcctggct

SEQ ID NO: 134 - DNA, 5814 bp, Homo sapiens
gcgtgaggccgagggaggggcggcggcgcgagcggcggcggcggcggttccagcatgaagaggagagctggcctggggggcagcatgaggtcagtggtgggcttcttgtcccagcggggcttgcatggggaccccctgctcactcaggactttcagaggagacgcctgcggggctgcagaaacctctacaagaaggacctcctcggccacttcggctgtgtcaatgccattgaattctccaacaatggaggccagtggctggtctcaggaggagatgaccgccgggttctgctatggcacatggaacaagccatccactccagggtcaagcccatacagctgaaaggagagcaccattccaacattttttgcctggctttcaacagtgggaacactaaagtgttctctggaggcaatgatgagcaagttatcctccatgatgttgaaagcagtgagacattggacgtgtttgctcatgaagatgcagtatatggcttgtctgtgagcccagtgaatgacaacatttttgccagttcctcagatgatggccgggttctcatttgggacattcgggaatccccccatggagagcccttctgcctggcaaactatccatcagcctttcatagtgtcatgtttaaccctgtggagcccaggttgttggccacagccaattcaaaggaaggagtgggactctgggacattcgaaaacctcagagttctctcctgcgctatggtggaaacctgtccctccaaagtgccatgagtgtacgattcaacagcaacgggacccagctcctggccctgaggcgacgcctgccccctgtgctctatgacatccattcccgcctgcctgtgtttcagtttgacaatcagggttacttcaactcatgcaccatgaaaagctgctgttttgcaggagatcgtgaccagtatatcctttcgggctctgatgacttcaacctgtacatgtggagaattcctgcagatccagaagcaggtggcattggtagggtggtcaacggagccttcatggtgctgaaagggcatcgatctattgttaaccaagtccgatttaatccccacacctacatgatctgctcttctggtgtagaaaagattatcaagatctggagcccatacaagcagccaggatgtactggagacctcgacggtcggattgaggacgattcccgctgcctctatacccatgaagagtacatcagccttgtgctgaacagtgggagtggcctgtcgcatgactacgccaaccagtcggtccaggaagacccccggatgatggccttctttgactcactggtacgccgagagatcgagggctggagctctgactcagacagtgacctcagtgagagtactatcctccaactgcacgctggggtcagcgagcgctcaggctacactgactcagagtcttcggcctcattgcctcgctccccgcctcccacagtagatgagtctgccgacaacgccttccacctggggcccctgcgggtcaccaccacaaacacagtagcctcaactccaccaacacccacgtgtgaggatgcagcctctcgccagcagcgtctgtctgctctgcggcgctaccaagacaaacgcctcctggccctttccaatgagtccgattctgaggagaatgtctgtgaggtggaactagacacagatctctttccccggccacggtcacccagccccgaagatgaatccagcagttccagcagctctagcagctctgaggatgaggaggagctgaatgaacgccgagcctctacctggcagcggaatgccatgcggcgccgacagaagacaacccgagaagacaagcccagtgccccaatcaagcccaccaacacttacattggagaagacaactatgattacccccagatcaaagtggatgacctctcctcctccccaacctcgtcccctgagcggagcacttccacgctagagattcaaccaagccgggcatcaccaacttctgacatagaatcagttgagcgaaaaatttataaagcttacaagtggctccgctactcttatatctcctactcaaataacaaagatggagagacctccttggtgactggggaggcagatgaagggagagcaggaaccagccacaaagacaacccagccccttcttccagtaaggaagcctgtctaaacatagcaatggcccagaggaaccaggacctgccacctgaaggctgcagcaaggacacttttaaagaagagactcctagaactcccagcaatggcccaggccatgagcacagcagccatgcttgggcagaggtgccagagggtacctctcaggacactggcaatagcggctctgtagagcacccttttgaaaccaagaagctcaatggaaaggccctgagcagtcgggctgaggagccgccttctcctcctgtccccaaggcatctggctccactctcaacagcgggtctggcaactgtcccaggacccagtctgatgacagtgaggagaggagcctcgaaaccatctgtgccaaccacaacaatggacgcttacaccctcgtccccctcaccctcacaataacgggcagaacttgggggagctggaggtggtggcctactcttccccaggacactcagacactgaccgtgataactcgtccctgacagggacactcctacacaaagattgttgcgggtctgaaatggcctgtgagacccccaatgctggaacaagagaggaccccactgacaccccagccacagatagtagcagggctgttcatggccacagtggcctcaaaaggcaacgaattgaattggaagatacagattcagagaattcctcctcagagaagaaattaaaaacatgataaatacaaagggaaaacaaaaagctacaaaagtagccttacaaaaaaaaaaaattgtttagtgaatacagaggaaaggaaaaacaagtattaaaggcacatgaaaccagggcctgaaattttgtgtctgatgctgctcccttctatccaacattcaacaacgggtctgaatgtctagctggccattggcttgtgctgtgttaagaaaggggaaaaaaaaataacccaagtgactcctttctagtgagacgtgagcgtagtgtgccgcgcaaggctctgtggaagtaaatctttgttgagacgttcgacttgttcttgtgtacgcacaatggcacgtgtgcgcttattgtctcataagaccttccttttagttctccatcagaaaggacctatgaatttgtactttttgccatctcaccctgtttacatgccataggtgttctggtctggatgatgggtgcctgttaaatcaggttgtgctgccagtgagttgtagatttatgctggaagaatggagaatggaaacaggccttcagcccattggctgcgctggagaggaaagcatggttcctttcttaaagaaatcttccatgttttctctaagtaacacttctttattgagcatttaatgtggacatactataaaaaagaatttttaatgctaatgagaggtttagcacttaagatcagattcaagagaatatagattcctgataaatttcactgtttgcaaattgagcagtgctgcaacatgtactgtatgaaggccataaaatagagctagtcatggataacagactttaaccagttaggtgctagatcctaagaggcactcacaaggccagcaggtgcttccttggctcccatgatcgatcgaggcatagtgaaagaagggcaaagacagctttccagagctttgtgctcaggctactaaagtagttgttataggtgtgttaacgaagaagcttagtgaggagcagaatgtggtactatattcatttaactcaacccagaaccattggtcagaattggtgggactggcatcttccctcagacttgcagttgatagaggctgtggtgttctcactagactttgcagagcagtaggcatctcaaggtaacagattcttattgagtaggtctattaggagtcagaaggtgttggggaggagtctctggcttatgactcctggttcccattagtcttaagtcttctggttcccataaaagactcagttttattgaggtagatacaggtttagaagagaaaagagcaacagattttcagcgttgcagtcactcggttatctatgaagggttgtgcaaaacaggaaggtctgggaatgaccagatatcttgttggcataaatgttatgaaaaggcagaatactggcaagaaatgaggaagagagagaaaaacaatataactttcttgagtgcaaaggtgctagacaactaggagcccagctgggattggtgtagggagggccgaacgctgactagtgtggcctcactgccccaggcttcctttcagaggaaggcctgtcctgctggaactggagccaaggggaggctgcctatgaaggcagaagatgtggatgaattcaggcactgggggtgggggggttatttataaacacaaggtggttggtttaagccaaaaggagataccatcctgataagctctgtgaaagagaagatgtgcctggtgtgtgtaatgcggctggggtatgaaaacactgagaaggagatgaaggagtgtgtgtagcatgggggtgtgtacaacttaacacctggacttttactgggggagtgggaaagtgattctgtaaccaacattagaattactttggatttgtaatcagattggttctatgatttgtctttgactattcacagataattgtaaatgctggttttataagcccaagtcattttacatttgcttttccaaaatgtattaaattggaatttttttaatcctttatatacaaaaaaatacgatcactcagtgtgtgtttctcttccccttcttagtcagcacacccagtcctttattttattctattctatttattttattttaataagtacttagcctcttctgacttctcaaaggacaatcggatacatatcttcctgaaaagaagtagttaaagttcccttgggaactagctacttggtagttacaattcccaaatgcagaacttggtcttttcatgttaaaagccttaatctcatttgggtactcaaaagagaaatcagagtttattctggttaacttgagaagccaagaaagatcatttttagcaagtatgccttccatccttggcagaggcttcccagcatcctaggctcagcttaccgggtgataggccccataagacacacacatgagcagggtgagaaatgcttgctttatagctgctccaccctcatctccagagattttgtgtctatggttgtgggtctggaaacctggcaggaaccacttctagagtacctttgcctaaactcttttagaattgaggccccaactttgatggcacatttaatacccaatttcttccataatagatatttttaatagcaggacagatggcactgattagatcaagaactatttggaagtgcctcttatgtttttttcctgcattctgtacataaagttttaagtggcaggtccagatatgtaaaatcatttctctctattttccagctggttttgttaatgattctctaggacagcaggtaaatgagttaagttgttggcttggggcaagtgaagtttgtgactatgcttgatttaataagctgagagtctcttgtttgtctgtcaaggtgccttcctctgctgaagccttacctccttctcacccagtaacggttaactcttctcttgtgtatatgcaaataaacctattattcact

SEQ ID NO: 135 - DNA, 2576 bp, Homo sapiens
gatcgtgaaccgggagaagctgtcggagtcggtgctgatgaaggtggagcgggagatcgccatcctgaagctcatcgaacacccacatgtcctcaagctccacgacgtctacgagaacaagaaatatttgtacctggttctggagcacgtctcggggggtgagctattcgactacctggtaaagaaggggagactgacgcccaaggaggcccgaaagttcttccgccagattgtgtctgcgctggacttctgccacagctactccatctgccacagagacctaaagcccgagaacctgcttttggatgagaaaaacaacatccgcattgcagacttcggcatggcgtccctgcaggtgggggacagcctcctggagaccagctgcgggtccccccattatgcgtgtccagaggtgattaagggggaaaaatatgatggccgccgggcagacatgtggagctgtggagtcatcctcttcgccctgctcgtgggggctctgccctttgatgacgacaacctccgccagctgctggagaaggtgaaacggggcgtcttccacatgccccacttcattcctccagattgccagagcctcctgaggggaatgatcgaagtggagcccgaaaaaaggctcagtctggagcaaattcagaaacatccttggtacctaggcgggaaacacgagccagacccgtgcctggagccagcccctggccgccgggtagccatgcggagcctgccatccaacggagagctggaccccgacgtcctagagagcatggcatcactgggctgcttcagggaccgcgagaggctgcatcgcgagctgcgcagtgaggaggagaaccaagaaaagatgatatattatctgcttttggatcggaaggagcggtatcccagctgtgaggaccaggacctgcctccccggaatgatgttgaccccccccggaagcgtgtggattctcccatgctgagccgtcacgggaagcggcgaccagagcggaagtccatggaagtcctgagcatcaccgatgccgggggtggtggctcccctgtacccacccgacgggccttggagatggcccagcacagccagagatcccgtagcgtcagtggagcctccacgggtctgtcctccagccctctaagcagcccaaggagtccggtcttttccttttcaccggagccgggggctggagatgaggctcgaggcgggggctccccgacttccaaaacgcagacgctgccttctcggggccccaggggtgggggcgccggggagcagcccccgccccccagtgcccgctccacacccctgcccggccccccaggctccccgcgctcctctggcgggacccccttgcactcgcctctgcacacgccccgggccagtcccaccgggaccccggggacaacaccaccccccagccccggcggtggcgtcgggggagccgcctggaggagtcgtctcaactccatccgcaacagcttcctgggctcccctcgctttcaccggcgcaagatgcaggtccctaccgctgaggagatgtccagcttgacgccagagtcctccccggagctggcaaaacgctcctggttcgggaacttcatctccttggacaaagaagaacaaatattcctcgtgctaaaggacaaacctctcagcagcatcaaagcagacatcgtccatgcctttctgtcgatccccagcctgagtcacagtgtgctgtcacagaccagcttcagggccgagtacaaggccagtggcggcccctccgtcttccaaaagcccgtccgcttccaggtggacatcagctcctctgagggtccagagccctccccgcgacgggacggcagcggaggtggtggcatctactccgtcaccttcactctcatctcgggtcccagccgtcggttcaagcgagtggtggagaccatccaggcacagctcctgagcactcatgaccagccctccgtgcaggccctggcagacgagaagaacggggcccagacccggcctgctggtgccccaccccgaagcctgcagcccccacccggccgcccagacccagagctgagcagctctccccgccgaggcccccccaaggacaagaagctcctggccaccaacgggacccctctgccctgaccccacggggccggggagggaggggacccccctccaccccccttccgtgccccccaactgtgaatctgtaaataaggcccaaggaacatgtcgggaggggggtggacacaaaaaccggccttgccctgcagggatggggctccacaggccgtgcccaactgggggtggttctaggggaacagggggcgggggagctgtttctattttatttattgattaatttattattttatttattgatcaatctctctgcggggtggggtgggggagggacgggagctggttggggtggcttagcagatccggacagggccctctgtccctgtgtcgtccccaaccccctcttcccgggcccctcctcccctggtcctccccccacgaccttctgtacggatttgctctccggaaggaattctggtttcgcgtg

SEQ ID NO: 136 - DNA, 4891 bp, Homo sapiens
tttggaaagggattgaattggaaattgtcaatagctgtgaaaagaacaatagtgtttgttcccatcaccgtgaacatgaaattggtgctccccgttgttcctgtaaccatggacaccagcttgattctgatgagaaaacatgcatagatcttgacgaatgtgagaatggagaagcctgctgtgcccagctctgcatcaactatttaggaggctacaaatgcagatgtcaggaaggctttcagatcacttccaatggttgtgaatgtgatgatgtggatgagtgtctggatgtcagtatagtctgtgaccaactacattaattctgtgggaacatacgaatgtagttgtgaagaaggctacagaattggaaatgacagaaaaacttacccctctttagatgatgatgagctagaggaagaagaagaggaatgagaagttgtgaggtttccaggtcttctattcaagagcccacctcaacagcttcattatgttgctacttttctgcctcccacctacaaagatgaagaagatgaggaggaagaggaaaaagatattcatagagaactgactgctttgcacaattttgtctgtttagatcacatctttggacacaattgcagcttgagctgcaaggactgcatgaatggaggaaagtgccaggaaggaaagagtgaatgctcctgcccagcaggttgccgtgtcattctttgtaatgaaagtaagtgacaccctgagaattgggtaagtgctccaaactactcctttacatatgttctccccaaaatgttttaataaagtaagcaattgataagtatgagaagacaatttatttgttgggcataaataatgcttatgaagtgctttaagttttaaactgaatatgtgatttaaaaaggagattttgtgttccctaggaaactcaacatgctgtctcttgtttatccatggaatgtaaaagttaataaaggatcctaatattctaggcctataaaaatccctccatttaaataaatcattaggccctgacaagctattcccaatgaagaaaaaaggaaaggatttgtgctacaaagtgcaatttaaatggacttgcttgactgtttgctacttggttttgtgtacttttttgttctttttctttttaaaaacatgtaaacacagccaatgacactggtttaatttttttattcaagtctctcatgagtaagttcaaagatttaaaaatgatactgcccaaaattcctttcctctatattttaaatgaaggtatgctttcaggagttcaaacttccaagtgataaaatgtattgactatctttgtttcttctttctctttttaaattcattttatgagttctatttatataagtgttttgtcttagtttttgtgattggcttggaagatgatatgaacagattttcttttgaactctctacatatgggaggaacacagctgttgttactcttatatgatatagatgcaaaacttcagtcataacatagtgaaatggtttaaccaagattactagttagggttttgaggatcttcctcatgcatccctctgatcatgtttctctgctgctgaaaagctttgtgcctttcccttcacataaagtgtatacatcttacccagtcactagtggccatcagactctcataaatccttttggctttttgtcctagtcttaacgcttcacctaacctattatttcccgcatactaaaccactcactacttaatgtgctgcatttttcatctttgtgccttttgctaaactgtcatccttgaaggcctatttctgcctattgcatgaagctttatttgatggcctcagtctaacacagctatttatgtttttggtggattaaaaaaaaattctctctctctacattggattattttctatcttctttactagactgggagcttgctggccaggtcctattcatgcttattcattgtgaatttctccacactggaggtatccagtgcatgaatgaacacatgaataaaacttggtgttgaaactcccagctatattgacctgcaacttggcacactcaaatacataaaattgggatcaaataaatattattgcatgaccactagtaagtcaatatttaccttatattgtaagttttattgataaatatgcatctcccaatacttatccctaacatagtaaaaaaactaaaaaatctatctcaaacaaataagaataaaataaataaaaatttaaaaataaaaaataaaaatataaaaaatattttacacactaataaatttaaaaactaaaaaataaaataatgaaaaaatctgtctctaacacgtaagaataaaatatctctgacataaaattaataccaaaatattgaaaatgagcttgctgataaaatagaaatgagatggcatcttctttggctttagaaaaccttggggatctctcaaatatttatatgttgcaataaaggggagtctacccctgaaagcagaacttctatcttctttgtactttctctatatccttctcttatttcttttacaacaatgaaaacagaacaatctatttaggagaaacaaaaaacaattgttcatatttttttaacaaaaagaaggagtgggaatattttctttaaaatccctattggccagggatgctggctcatgcctgtaatctcaacactctgagaggctgaggcaggaagatcgcttgaggccaggagtttgagaccagcctgggcaacatagcaagtcctagtctctacaaaaataataataataagaagaataagaataaatccctttaaactacaataagcagagaccagttattcattggctatatttttaagattgccagcttttcaaatgcagcaaaataaatgaaaaaagaactttcaacagggatctagaagtcagttttcccgttgagtagatcttctagcccaatacatttattagtctataatgaaaatatctactttgatttcttagaggtttcttcaaataaatatattgaaacaattttaaaatgaccacatattatttaattttaaaagcacacttttagaaccccatttcttatgaaaggtttcatatcgagatcatttgttattgtgagactgtatctggtggaaaggaaagataggagtatttttcatatgtcaaatgagtagactaaaacatgggaggagagatttatgactttttttttacatcatccagctatggtttgggacgtgtttgttttacatttttcttccccagaatctctacactgtttgatctaatgaagtatttggcaaatctatagactatatgataatcacagtttactttgtgagggagtgtcaaattatagtgtcggtttgtctatattgatgactcgccataatccagacgctgtgcaagccatttaaacttccttagcttcattttacaggttaagtgtttaaaaattgccccttctgtagttgctgttaaaatgcaaacattaacaaaatgtaaattaataatataggccacaacaaatgcttgttgccagtctctcattttttgtttatcctttccttttttccctttcatagtaacctatggcttgaaagcaaagaaaagggtgaataagaagccaagttccatattagcatctggaatgggagcaggggatgaatggagcagattttataaatgtaattttataacatttagcctattatgataaaatgtcaattacaattattactgaaattatctcaacagctacatttgcttacattacaatataaagtcaccgacatttttcccaatttattgttttatagagcactaaacacaaaaataccaacaacctaatgaaaactgttgtttgcctgactttgtcttatctttggcaatgcaaactaccttgggacccccatgagaaccttagctgcattcattcctggttaaaaatacatgacattttaaaagcatttttccctcagttttcaaaatagaagatgcagtttgtttctcgttagggttggaattgtacagcaaagttgtctgggtagcttttaaagtgtgagggttagagtttaagaaatgagataaattttgcatttgaaacttgttagcaatttcttcagtcatcattattttaactagctgtatcagtaatcccctcgggagtgattatgctatacaaactaggaacatgccagaaaattttcctgggtctgtaagccactgagtttttaattacttggtatctatcctgatagaaagagaagctattttttccctccatttgtatcagaacacgtatgttccattgcttgttcatcttctctagtttcttcatagcttattccccagagaccagtgagaaagaatgtggcagcatcggtaattgtcagaatggaggcatctgtgatcttctgactgggcactgccagagccccccaggggttcatgggaaaacttgtgaagatagaaggaatgtctggtgccagtcagttaagttcttggggtttctaatgagaagtaaactaagtgaaagttgcatgtgtatttttcaaaatggcctttttctgaagaagtaaaagactgtgaaagctgtgtctgtatatataaaagagtacaattgttttgactgatgacatgtgtaacaacgaaataagtgatatttaaatctccaactgtgatctaagcaggacgaatcctcttacagagaaagcctttttcttctactgagcaaaaagttacaattatgtatataggtttagatgtaggagcttaggagaagttattttctctgcataacaaaatgaagaacaatagagctccttggggaaaccagggaggaagacagatgaaaattagagaagaaaagggaaggaggtagagag

SEQ ID NO: 137 - DNA, 7522 bp, Homo sapiens
aaagattgctttcttctgggacgctgcttgaacgctaaccgcgttgattggaacagattttgtgtcttggctggctttgggtgaagaccggggagaaaaggttgcgctgcgattctcaagatctctggacctggattatcattgcaaatccattaaagaaggagaagcaagcggatttcagagaggttgttcttcagaaaaaaatggttatttctttgaactcatgcctgagctttatttgtttattgttatgccactggattgggacagcatcacctctgaatcttgaagaccctaatgtgtgtagccactgggaaagctactcagtgactgtgcaagagtcatacccacatccctttgatcaaatttactacacgagctgcactgacattctaaactggtttaaatgcacgcggcacagagtcagctatcggacagcctatcgacatggggagaagactatgtataggcgcaagtctcagtgttgtcctggattttatgaaagcggggaaatgtgtgtcccccactgtgctgataaatgtgtccatggtcgctgtattgctccaaacacctgtcagtgtgagcctggctggggagggaccaactgctccagtgcctgcgatggtgatcactggggtccccactgcaccagccggtgccagtgcaaaaatggggctctgtgcaaccccatcaccggggcttgccactgtgctgcgggcttccggggctggcgctgcgaggaccgctgtgagcagggcacctatggtaacgactgtcatcagagatgccagtgccagaatggagccacctgcgaccacgtcacgggggaatgccgctgcccaccaggatacaccggagccttctgtgaggatctttgtcctcctggtaaacatggtccacagtgtgagcagagatgcccttgtcaaaatggaggagtgtgtcatcacgtcactggagaatgctcttgcccttctggctggatgggcacagtgtgtggtcagccttgccccgagggtcgctttggaaagaactgttcccaagaatgccagtgccataatggagggacgtgtgatgctgccacaggccaatgtcattgcagtccaggatacacaggggaacggtgccaggatgagtgtcctgttgggacctatggcgttctctgtgctgagacctgccagtgtgtcaacggagggaagtgttaccacgtgagcggcgcatgcctctgtgaagcaggctttgctggcgagcgctgcgaagcacgcctgtgtcctgaggggctctacggcatcaaatgtgacaaacggtgtccctgccacttggaaaacactcatagctgtcaccccatgtctggagagtgtgcctgcaagccgggctggtcaggactctactgtaatgagacatgttctcctggattctacggggaagcttgccagcagatctgcagctgccaaaatggggcagactgtgacagtgtgactggaaagtgcacctgtgccccaggattcaaaggaattgactgctctaccccatgccctctgggaacctatgggataaactgttcctctcgctgtggctgtaaaaatgatgcagtctgctctcctgtggacgggtcttgtacttgcaaggcaggctggcacggggtggactgctccatcagatgtcccagtggcacatggggctttggctgtaacttaacatgccagtgcctcaacgggggagcctgcaacaccctggacgggacctgcacgtgtgcacctggatggcgcggggagaaatgcgaacttccctgccaggatggcacgtacgggctgaactgtgctgagcgctgcgactgcagccacgcagatggctgccaccctaccacgggccattgccgctgcctccccggatggtcaggtgtccactgtgacagcgtgtgtgctgagggacgctggggccccaactgctccctgccctgctactgtaaaaatggggcttcatgctcccctgatgatggcatctgcgagtgtgcaccaggcttccgaggcaccacttgtcagaggatctgctcccctggtttttatgggcatcgctgcagccagacatgcccacagtgcgttcacagcagcgggccctgccaccacatcaccggcctgtgtgactgcttgcctggcttcacaggcgccctctgcaatgaagtgtgtcccagtggcagatttgggaaaaactgtgcaggaatttgtacctgcaccaacaacggaacctgtaaccccattgacagatcttgtcagtgttaccccggttggattggcagtgactgctctcaaccatgtccacctgcccactggggcccaaactgcatccacacgtgcaactgccataatggagctttctgcagcgcctacgatggggaatgtaaatgcactcctggctggacagggctctactgcactcagagatgtcctctagggttttatggaaaagattgtgcactgatatgccaatgtcaaaacggagctgactgcgaccacatttctgggcagtgtacttgccgcactggattcatgggacggcactgtgagcagaagtgcccttcaggaacatatggctatggctgtcgccagatatgtgattgtctgaacaactccacctgcgaccacatcactgggacctgttactgcagccccggatggaagggagcgagatgtgatcaagctggtgttatcatagttggaaatctgaacagcttaagccgaaccagtactgctctccctgctgattcctaccagatcggggccattgcaggcatcatcattcttgtcctagttgttctcttcctactggcattgttcattatttatagacacaagcagaagggaaaggaatcaagcatgccagcagttacctacacccctgctatgagggtcgtcaatgcagattataccatttcaggaacccttcctcacagcaatggtggaaacgctaatagccactacttcaccaatcccagttaccacacgctcacccagtgtgccacatcccctcacgtcaacaacagggacaggatgactgtcacgaagtcaaaaaacaatcaactgtttgtgaatcttaaaaatgtgaaccctgggaagagaggccctgtgggggactgcactgggacattgccggctgactggaaacatggcggctacctcaacgagctcggtgcttttggacttgacagaagctatatgggaaaatccttaaaagacctgggaaagaattctgaatataattcaagtaactgctccctaagcagttctgagaacccatatgccactattaaagacccacctgtacttatcccgaaaagctcagagtgtggttatgtggagatgaaatcgccggcacgaagagattccccatatgcagagatcaataactcaacttcagccaacaggaatgtctatgaagttgaacctacagtgagtgttgtccaaggagtattcagcaataatgggcgtctctcccaggatccatatgacctcccaaagaacagtcacatcccttgtcattatgacctgctgccagtccgagacagttcatcctcccctaagcaagaggacagtggaggtagcagcagcaacagcagcagcagcagtgaatgacaccaaaggaccgcttggtagccactggaaccctttccagaactgctgtttggttcttctccatcctcaattttgccactttcatgtgaatgttagtcaattcggtgggcaatttttggacatgaaccagaaagctgaaagctgaggctgacacggactgtaggtgctttttgttcaggtggattcgaaggagttagagatgtgatttgccattgctgttagttttagaactatacccgtgaagcatgacttattgtaagatgttggctgaaagcatgaacttgcagaactccctcggagacgcaggttgcagtggacattgggattgttgcttgaaaaattaaaatttgaatattttctctctcatttgcatcatacagctctacctaggattgtacagtttaccataaaatttacttcatgaaagtgggaatcactgaacatgtagaagacaaggaacatattgttaactcctgattcttaactttattcaactggactcagaattgtagggataatatgaatgcaggaggaaacattctgtcaggcggtatgactggacagactttgaatatactctaaaagtggacagaaaatttacgaaaatcttagattttgtttagaatgagaaaatatacaattagaattattttagaaatagtaggaagtattgcagaagtcaatacacaaatgtgccaggcagaggtggttttctctgtttgactctcaaccaacttcagatctatgacattattctgatcactggctccatcatacatattcaccacttgagattcataacatatcaatagttatttcataaatatagaaatgaaataattttatttttgacagactggatggaatgagtgtgtaatgattgataaaggttgtaaattttaaatgcaagatgacgcttacgttctgtaaaccattagtaatacatgctgtaatatagaattagtggaacattttgattaatctttccctagaagtgactgaaatatttttgtgcatatttgagaaagggaactttccttttattaattgtcaatttagagaaactatgcttaagctggtcttttgcattgctaatgtgacatgtacccaacttttcattaatttgtatttccatttttaaattgcatattctatgttttgtagtgtttggattgttaatgaaaaaatattatatgttcgttattccttgtattattgccacttatcttttgcttgataaaaatgcgttgttcttttttcttttggagggacaagatgaaaatatataatttgaattgattaaaattggtcgttactaaaatagtatagtaaccacaagtgattggcttataaatgaagtagaaatgctttttaatattccaaaatagagttccttttgatctgttggtgctgagccttggttaaaccagggagaaggggagcagaaaggaaacgttgttactgatgagtaccacagactcatcttaaaaaaaactctcattatggtgatcatagaattgaccatccaaactgggacactcttgagagtaaatggagggcattattaataattatcttgtaatgaacttaaatctggactgttccaggcaaaccagacttatcttgcaatatgagaatgctgacacaatgcaggaaagccagtttcccttttgttgatctacttgaccaagcaaaggggctgaaaaactgaataaggaaacaactttataagagaaacagtggtcttcaatcttttaaagacatgaaatcctatatggcattctgtctcagtgagtcagttaacaaatacgtatgtgcaacccttctgctagtagtgcacataagtgattatccctgccaggtatcgagttggaatatccagttatttcatgtcacacatcggcacgtatgatggtggtttggtcagatggataatacagcagacacacttagaacactcactgcactggtggctgttcattttgaggaactccaaagtcaattcaaggaaataaggaatgacctggaacaggccttagaaacaattgatttattccaatagttaaccactggctggctcccaactctaggtgataggcatctaattgagacatgtgtgagtcaatagccatcggggtcctttttggtgagaagaaataagacattttctcccttttaaagatcatctcttcagagctgcatggtaaatttgaatttccccattgttctctagagataggtcaaaaaaacaactgtttcttttcttattccactattaataaattgaaagcttgctgtacaaaggcaacagcaacttaaaaaagaaaatctggacaatagatgtggactccaaggggccactgccatcccttcctgtgtgctctttttgacaagtaaatcactccagttagctgatgtcctgaaatgacatttgtacctgaggcaattcttattagagcttactcaggacttttcaaacatcaggacacacatagcaatttggatgttgtaaaactacgtgttacatttggagaggtcttgttgagaaggcaaaattttctaaatattttgatatcaatttgggtaaagaaaggaatacttttgttagaatgagaattaaagagaaaacaaaagaatcttggcaaaattttccctctgaaattacaaactttaggaacttttccagatgtatcgaatttaatttgacattgatgtcactcttcataccaagtgaatctattctcatgaactttgaacccatgttaattttggaccctataactaatttcctttctgtatcccatggtggtcaaagcagtaaaggagtttagagatacttagcaaatgccattcatatagtattgttagccaaactattattccttccttagaagttgatgtatcagaaaatttataagttatttgtatttatatataagtacatcagaacttgcccacatgataactcatgtttgctttaataaggaaaatatgttatttgaggttaattatatgatagtgaggaacattttacaattatttacagtgtttgacattaattgctgtcctatgatacagtagtaatgttaacagagagtttaatatgtttagcattatctttatggaatttatattcaccaatttcaggaaaaccaaccatagaactttataataggacagttataacctgactgaaccaaatccatcagcataatgactgtgtgttctgagaaatgcaaacaactttatgaaagtgtggtcatcttgacccccaaagagccacagtagctgtcaattattgagatttttaaatggtaaatattgcaaaagttaaacaagggtaccacaatatcatttataattgatgtcaatattagtagtccactttatgcttaaaataaaatcataaaaaatcaagttttaaggttatattttttaaaataatgaattttctatctctaggcaacatgtctttattattcaagctgaatgtttaagagagattttggtcttaaaggcttcatcatgaaagtgtacatgcatatgcaagtgtgaattacgtggtatggatggttgcttgtttattaactaaagatgtacagcaaactgcccgtttagagtcctgttaatattgatgtcctaacactgggtctgcttatgctagttcagtatttggtctaggcttcattttgatatgactgaattgcaatctatatttttaaaaagaaaaatcaaaatacattagggtttacttggttgtggcaaacaaacaaaaaatgctttcagtgttgaaatatctctattttccaaagatgataaactttcatcgttcttagcctacattgtcatttatatcaccaaatgagtttatagattaatgcaataaactttctaat

SEQ ID NO: 138 - DNA, 5515 bp, Homo sapiens
cttgctttgtcacccaggctggagtgcagaggcccgatctcggttcactgcaacctccacctcccaggttcaagcgattctcctgcctcagcctcccaagtaaatgggatttcaggcgtgcaccaccacgcccagctaatttttgtatttttagtagagacggggtttcatcatgttggtcaggctggtcttgaactcctgacctcgtgatccgcccgcctcggcctcccaaagtgctgggattacaggtgtgggccaccgcgcccggccgggaacatccttttcatccggtccatgtcttgcttgtgccttggtctcttgtggaccgacagctgctgtctccctggccgggtgctgggccctctgcacccaccagccgcgttctccccgccccacccccctgcagtaccgcccagtgaccgcgcccctgtcccgcagaccgtgcagtccctcggcttcgccatctaccgcgcgctggactgggggctggacgagagcgaggagcgcgaactcagccctcagctggagcggctcatcgacctcatggccaacaacgacagcgaggacagcggctgcggtgccgccgatgagggctacgggggtcccgaggaggaggaggaggccgagggcgtcccccgcagcgtgcgcacctttgcccaggccatgcggctgtgcgcggcgcggctgaccgacccccggggcgcacaggcgcattaccaggccgtgtgccgcgcgctcttcgtggagacgctggagctgcgggccttcctggccagggtccgggaggccaaggagatgctgcagaagcttcgggaggacgagccgcatctggagacgcctcgggcagagctggacagcctgggtcacacagactgggcccgactgtgggttcagctcatgcgggagctccgccgcggagtgaagctgaagaaggtgcaagagcaggagttcaaccccctccccaccgagttccagctcacgcccttcgagatgctgatgcaggacatccgggcccggaactacaagctgcgcaaggtcatggtggatggggacatcccgccccgggtggagaaggacgctcacgagctcatcctggactttatccgctcacggcctccactgaagcaggtgctgccccagcctcctcctcctcaggggccgcccggggcctggtgctgtcctgtagccagcctgggaggtgtcccagcacgtcttcctgtggccagcctgggaggtgtcccagtgcgtctgcgtcacgggtgaggcgggctggcttcctcttgcctgtgtgccagcccggggctgtgtggccctgggccctttttctgggaaggggccatgtgagccatgcccaccccaccccaggtgcatgcggagcccagagccccctgggagcagcactccctccgggtgggcctggcaggctcttccgactccagagtgggcccgtgtcatggtcacttccccaccacaggtcccgcttccccaccgcaggtcccgcttccccaccgcaggtcctgcttccccaccgcaggtctcgcttccccaccgcaggtctctgagaggcggctgcgcccgttgccaccaaagcaaaggtccctgcatgagaagatcctggaggagatcaagcaggagcggaggctgcgcccggtgcggggcgagggctgggctgcccgcgggtttggctctctgccctgcatcctcaacgcctgctccggagatgccaagtccacctcctgcatcaacctgtcagtcacagatgctgggggcagcgcccagcgcccgcggccccgcgtgctgctcaaggcgcctaccttggctgaaatggaagagatgaatacatctgaggaagaagagtctccgtgtggggaggtgacgctgaaacgggaccgctccttctcagagcatgacctggcccagctccgaagtgaggtggcctctggcctgcagtcggccacccaccccccaggagggacggagccaccacggccccgagctggcagtgcgcatgtgtggaggcccggctcccgagaccagggtacctgtcccgcgagtgtctctgaccccagccaccccctactcagcaaccggggctcctcgggggacagacccgaggcctccatgacccccgatgccaaacacctgtggctggtgagtgagggtgcgattgtcgtccagggcggcccagggggcgtctttgcacccaccttcccgccgccagccaggtctgggagatgggtctgagcacctgtctggggggtgtggcctgagcgtccgtctgggggggcgcggtctgaacatggggcaccagtggtggagctgctggtctggggccgtggtctctgctgccgcctgctggggccgaaccgcactgcactgcggccccggagcctggtccctaattgaagggttcagtgtggggttagggcagacggtgaacctgcgtgccctgtgcctggaggtcagtgtgaggggggttcactgggtcgagaccttgactctggccgtgacgccgccacggtactgctcagcccctctgccctcggtttcttatctgacctgtaattgtgaagagctcacctttgctgacatcttgaggcccacgtggacctgagttctggtgcaggatttaatcaactgaggtaaggggagtgtgcggcccgtgggccacggtggcagcatgcaggtgttggagggatgtgaacggtgtggttgctgtcactatttgaggttttatccagcggctcagatgagaacagatgttaaaatgctttgagaactatgagccttatataaatgcaaggcactgtgcgtatccccaccgaaacgcagggcctgccctgttagcctaggtcgtatcccaccgaaggcagggcttgccccgttagcctaggattagctatatatcactgcatcaaaagttacctcaaaatgcagcatcttaaaataacaaatatatattatctcacagtttctgagggttgggactccggcagtgtcttagctgtgtggccatggctcagggtctttcgtgaggctgcagttaggatggcagtggggcctgatctcgactgaagggtcaaatcggggctggaggagccgtctgaagtggcgtcttcacccagctgtgagcaggaggcgtgagtcccttgctgtgtaggcctctctcgggctgcttggggatccccacagcgtggtggctggcgtcccccagagcacgtggttcaagagtgagcgcagtgaaagccactgagtatttatgaccaagtccagcagtgccacattgtcccaactcactaggaatgagtcactaagtccagcctattctcaaggggagggagagaattaaggcccacttctttttttttttttttttgagacaagagtctggctctgtcgcccaggctggagtgcagtggcgccatctcggctcactgcaagctccgcctcccgggttcatgccattctcctgcctcagcctcccgagtagctgggactacaggcgcccaccaccgcacccggctaattttttgtatttttagtagagacggggtttcatcgtgttagccaggatggtttcgatctcctgacctcatcatccgccctcttcggcctcccaaagtgctgggacctgacctcgtcatccgccctcttcggcctcccaaagtgctgggatcacaggcgtgagccaccgcacccggccaaggcccacttcttaaggaattagaggacacatttaagatgaccacaggtcacatgagtggttctttagctctgaagtctcagaagtgctttctgaaggggggctactgagcaccacagaacctggccttccatctgccctgggctcacagcctcacctggggagcaggcggcccttctctgtacctggcgtgaggtctcctggccacggacgttgttggcgtcacacctgtggcacctgaggtgaattgttcagatggaaacggcaccatcaggcaactggcaacagaagcctaaagccctgggtgcctcaggtcagaggaaggaaggaatgcaagggccccgctccccccaatgccaggagcgtgtgttcacagctttagacaggacaacccactgcaaatccaaagcagaaaacatggtccaactccatctctgtggcaccttcatagatggtgcccacctgccttggcagtgatgaccgacactgcgaacgctgtgctggcagtgtgtttaagggctttaactgaatcatctcgatggagctgaaatccagccccattttacagaagagaaaactgaggcttagagagatcaggtgtcaagttctatgccaagcacagggaagcaaaaacaggacacactcaacataaggtggccccaggaatcagtggccaggacacgggaggtgtgctgagcgcagatgggcagatgcaagctgaggtggcctgttggagggtcctggaccttccagaaaagaggacatcagctgctcagggagggaaggtttgagatggattctggctggtgtggatcagcccatggtgtgtttgcaggcagggacaccttgaacagacatgggctgaggggagtttgtgtggagcgtggccagtgaaggctgggctggccggcagggtccgctggtcatgggaggcctggcctgcagcagcagggcccatcaaagacatggggatggatggctgatggacaagatggctgatggacagcgttttagaaggtcgcaggcttgtttaggctgaggccagggagggttagggtcctcagggaaggagagtaagctaggggagcctcctgcatagaagacttcctacctgaggccgtcccctaggagttcagccaccccgtggagagcctggcgctgactgtggaagaggtgatggacgtgcgccgtgtgctggtgaaggccgagatggaaaagtttttgcagaacaaggagctcttcagcagtctgaagaaggggaagatttgctgctgctgccgggccaagttcccgctgttctcgtggccgcccagctgtctcttctgcaagagagccgtctgcacttcctgtagcataaagatgaagatgccttctaagaaatttggacacatccctgtctacacactgggctttgagagtcctcagagggtatcagctgccaaaaccgcgccaatccagagaagagacatctttcagtctctgcaagggccacagtggcagagcgtggaggaggcgttcccccacatctactcccacggctgtgtcctgaaggatgtctgcagtgagtgcaccagctttgtggcagacgtggtgcgttccagccgcaagagcgtggacgtcctcaacactacgccacgacgcagtcgccagacccaatccctctacatccctaacaccaggactcttgacttcaagtgacagccccaggtggccaggcctccaggaggcaccaggcaggccctgtatcaggctaggacgctctgagctgtgcatgtacatatatacatatatagatacatttataatatatac

SEQ ID NO: 139 - DNA, 1796 bp, Homo sapiens
cagcctgcggtctgagtgctgcgccaccctcggggcagcctgggggagcccctgcgaacgctgcgagatcgaccctgcctgtgcccggggctttgcccggatgacgggtgtcacctgcaatgatgtgaacgagtgtgagtccttcccgggagtctgtcccaacgggcgttgcgtcaacactgctgggtctttccgctgtgagtgtccagagggcctgatgctggacgcctcaggccggctgtgcgtggatgtgagattggaaccatgtttcctgcgatgggatgaggatgagtgtggggtcaccctgcctggcaagtaccggatggacgtctgctgctgctccatcggggccgtgtggggagtcgagtgcgaggcctgcccggatcccgagtctctggagttcgccagcctgtgcccgcgggggctgggcttcgccagccgggacttcctgtctggccgaccattctataaagatgtgaatgaatgcaaggtgttccctggcctctgcacgcacggtacctgcagaaacacggtgggcagcttccactgcgcctgtgcggggggcttcgccctggatgcccaggaacggaactgcacagatatcgacgagtgtcgcatctctcctgacctctgcggccagggcacctgtgtcaacacgccgggcagctttgagtgcgagtgttttcccggctacgagagtggcttcatgctgatgaagaactgcatgggtcggtgactgccgggcaggggtgtggtgggcgccctgggcagggagggcattgaggagagggagggtggggacggctgttgctgcgtggacgtggatggagggggcaggaggagggaggagctgtaaattagctgaggtacagtgagtctgggctccatgaggcctcgtccttaggagagagacctggggcctgagacctgggggtggccggcacactggggtgtggtctcccagggagggtgtgtagcttgggtagaggacagggaccctcagagaagcctgggaaatactgccggttatgaggcctctcgtccccatcattgacttcgttattcatttgatgagcatttcacatgcatcctctgagctagaggcactgcagggagctctagctccagggagccctctttccttggagctcacagcctaacaggaagacagacatgaataacatgaatcgctgaggaaatgcaaaactgggctgggtgcagtggccctcgcctgtaatcccagcattttgagaggctgaggcagtaggattgcttgagtccaggagttcgaggccagcctgggcaacataacaagaccctgtcactacaaagttttttaaaaattagctaggcatggtggcgcgtgctactcgggaggctgaggagggaggatcccttgagcccaggaggttgaggctgcagtgaaccataatcgcacttttgcactccagcctgggtgacagagtgagaccctgtctaaagaaaaaaggaaggaaggaagaggaaaaagccaggcatggtggctcatgcctgtaatcccagcactttgggaggctgaggtgggcagattgcctgagttcaggagtttgaaaccagcctgggcaacatggtgaaaccccgtctctattaaaatacaaaaaattagctgggtgtggtggcgtgcacctgtaggtccagctactcaggaggctgaggcaggagaattgcttgaacccaggaggtggaggttgcagtgagccgagatcgcgccactgcactccagcctgggcgacagagcgagattctgtctccaaatt

SEQ ID NO: 140 - DNA, 4353 bp, Homo sapiens
gcagtgctcatatacctccccctacttctatgcactgaggaagcatatcaagaaagaccaccccgccctgaaagccacagtcacgtccatcatgcgatgggcatttctagatggcttgatagaagctggctaccactgcgagtggtgcatctactcccatacggagcccaacggtttgctcctgcattaccaacggaggcatccagaacactatgttgattacacctacatggctactaaactgtgggctgggccagacccatcccctccctctctcacaatgccagccgaagccaaaacctacagatgcagggactgtgttttcgaagctgtttccatctgggacatcactaatcactaccaagcattccacccctgggccatgaatggtgatgagtcagtgctactggacatcatcaaggagaaagatgctgtggagaagcccattctttcatccgaagagttggcaggccctgtgaattgtgaaaacagtatacccacccctttcccggagcaggaagctgaatgtccagaggatgcaagactgtcccctgagaaaagcctgcagctagcttcagccaaccccgccatatcctccaccccataccagtgcacggtatgccaatctgagtataacaacttgcacggccttctcactcattatgggaagaagcaccctggcatgaaagtgaaggctgctgactttgcccaggacattgacatcaacccaggtgccgtctacaaatgcaggcattgcccatacatcaacacccgcatccacggcgtactgacccactaccagaagcgacacccgtccatcaaggtgaccgctgaggactttgtgcacgacgtagagcagtctgctgacatatcccagaatgacgtggaggagacgagcaggatcttcaagcaagggtatggcgcctaccggtgcaaactgtgtccgtacacacacggcactttggagaaactaaaaatccactacgagaagtatcacaatcagcctgaatttgatgtcttttcccagtcgcccccgaagctgccagtccccctcgagcccgagatgaccactgaagtgagcccttcccaagtctccatcactgaggaggaggtgggagaggagcccgtgtccacttctcacttctctacctcccacctggtctcccacactgtgttccggtgccagctctgcaagtacttctgctccacgaggaaggggatcgccaggcactaccgcatcaagcacaataatgtccgagcccagccagaaggcaagaacaacctcttcaagtgtgccctgtgtgcctacaccaaccccatccgcaaaggtctggcagcccactaccagaagcgccacgacattgatgcgtattacactcactgcttggcagcctccaggaccatcagcgacaagcccaacaaagtgatcatcccatccccgcccaaggacgactcccctcagctgagcgaggaactccggcgggcagtggagaagaaaaagtgctccttgtgctctttccagtcgttcagcaagaagggcatcgtgtcccattacatgaaacgccacccaggggtgttcccaaagaagcagcacgccagcaagttggggggctacttcacggccgtctatgcagatgagcatgagaagcccacactgatggaagaagaggagagaggcaactttgagaaagccgaggtggagggtgaagctcaggaaatcgagtggctcccattccgctgcatcaaatgcttcaagctgtcctttagcactgcagagctgctgtgcatgcattacactgaccaccacagtcgggacctaaagagggacttcatcattctgggcaacggcccccgcttgcagaactccacctaccagtgtaagcactgtgatagcaaactgcaaagcacagccgagctgacctcacacttgaacattcacaatgaggaattccagaagcgtgccaaacgtcaggagaggaggaaacagcttttgagcaagcagaaatatgcagatggtgcttttgcagatttcaaacaagagaggccttttggtcacttagaagaggtgccaaagatcaaggagaggaaagtggtgggctacaaatgtaaattctgtgtggaagtgcacccaacgctccgagccatctgcaatcacctccgaaagcacgtccagtatggcaatgtcccagctgtgtcagctgctgtgaagcaggaggcggatgaccctgcccacttgttcctggatggattggaagcagccaaagacgccagtggcgccctggtgggccgggtggatggtgaacactgcttgcttgatggaatgttggaggatgaaacccggccggggggataccattgcagtcaatgtgacagagtcctgatgtccatgcaggggctgcgttctcatgagaggagccacctggccctggccatgtttacccgcgaggacaagtacagctgccagtattgctcgtttgtttctgctttcaggcacaatttggatcgccatatgcaaacccaccacggacaccataaaccattccgatgcaaactctgctccttcaagtcctcctataacagccggctgaaaacacatatactcaaagctcatgctggtgagcatgcctacaagtgttcttggtgctcattctccaccatgacaatcagccagctgaaggaacactccctcaaggtccacggaaaagccctgaccctccccaggccacggatcgtcagtctcctctcctcacactcccaccactcctcccaaaaagctaccccggctgaagaagtggaagactccaatgactcatcatattcagagcccccagatgttcagcagcagttgaaccactatcagtcagctgccctggcaaggaacaacagccgtgttagccctgtgcctctttctggggctgctgctggcactgagcagaaaactgaagccgtgcttcactgcgaattctgtgaattctcctccggctacatccagagcatcaggcgtcattaccgggacaagcatggtgggaagaagcttttcaagtgcaaagactgctccttttacacaggctttaaatctgcttttactatgcacgtggaagctgggcactcagcagttcccgaggagggccccaaagatcttcgctgtcctctctgcctctatcacaccaaatacaagcgcaacatgattgaccacatcgtgctgcaccgagaagagcgtgttgtccccattgaagtttgccggtccaaactgtccaaatacttgcagggagtagttttccgctgtgataagtgtaccttcacctgctccagtgatgagagcctccagcaacatatagaaaagcacaatgaactgaaaccttacaaatgccagctctgctactatgagaccaagcacacggaggaactggacagccaccttcgggatgagcataaggtaagccgtaactttgagctggttggacgggttaacttggatcagctggaacagatgaaggagaaaatggagagctccagcagcgatgatgaggacaaggaagaagaaatgaacagcaaggctgaagacagagagctgatgagattttctgaccacggggctgctcttaacactgagaagcgttttccatgtgaattttgtggacgggcgttttcacagggctctgagtgggaaagacatgtgctgagacacggcatggcattgaatgacaccaagcaggtgagcagagaagaaatccacccaaaagagatcatggagaacagtgttaaaatgccctccatagaggaaaaggaagatgacgaggccattgggatagacttttccctaaagaatgaaacagtagccatctgtgtagtaactgccgacaaatctctcctggagaatgcagaggccaaaaaagaatgagcgtttggtgaaattcttaatcaaaccttacttgaacagtgatgaaaaagtgggagggctggcttgggctgagaagggagggacagaaaagagaagacagaacaaagctgctttttaggactgaacaatctattttcaaagcactggtacctgtgtgagtgagtatgtaaattaaagttatttaaatggttggaatatgtggctccttttccatcactacatcttttcttccggatcttcatcatggaagtttcatttgttgcggaatatggaagcacctcccaatggtacggtgcaccctgtggtggtcttggacagtatgtggaaacagaagctccatgacggtagaagacttctcattggggagcaactttttgacgcacaacttttggtgtgtttttctagttttaataccttaagctttttcaagacctaactgcagccgctttggg

1. DNA comprising a nucleotide sequence encoding a polypeptide (a) or (b) as follows:
(a) a polypeptide comprising an amino acid sequence which is identical or substantially identical to an amino acid sequence represented by any one of SEQ ID NOS: 1 to 70;
(b) a polypeptide which comprises an amino acid sequence derived from an amino acid sequence represented by any one of SEQ ID NOS: 1 to 70 by deletion, substitution or addition of a section of amino acid(s), and has biological activity which is substantially the same characteristic with the function of the polypeptide of (a).

2. DNA hybridizing to the DNA of claim 1 under stringent conditions, and encoding a polypeptide having biological activity which is substantially the same characteristic with the function of the polypeptide of (a) of claim 1.

3. A gene construct containing the DNA of claim 1 or 2.

4. A polypeptide (a) or (b) as follows:
(a) a polypeptide comprising an amino acid sequence which is identical or substantially identical to an amino acid sequence represented by any one of SEQ ID NOS: 1 to 70;
(b) a polypeptide comprising an amino acid sequence derived from an amino acid sequence represented by any one of SEQ ID NOS: 1 to 70 by deletion, substitution or addition of a section of amino acids, and having biological activity which is substantially the same characteristic with the function of the polypeptide of (a).

5. A recombinant polypeptide, which is encoded by the gene construct of claim 3.

6. An antibody against the polypeptide of claim 4 or 5.

7. A DNA chip, on which the DNAs of claim 1 or 2 are arrayed.

8. A polypeptide chip, on which the polypeptides of claim 4 or 5 are arrayed.

9. An antibody chip, on which the antibodies of claim 6 are arrayed.
